United States Patent Application Publication US 2007/0298491 A1 - sequence listing, part 3

SEQ ID NO: 2927 - DNA, 2068 bp, Homo sapiens
  misc_feature (57)..(57): n equals a,t,g, or c
  misc_feature (139)..(139): n equals a,t,g, or c
  misc_feature (2017)..(2017): n equals a,t,g, or c
  misc_feature (2029)..(2029): n equals a,t,g, or c
  misc_feature (2034)..(2034): n equals a,t,g, or c
ggtagagactctgttcagctagaagccttggatattatggctgatatgttgagcagngaaggaggacttcttgttaatttccatccttcaattctgacctgtctacttccccagttgaccagccctagacttgcagtgnaggaaaagaaccattatcgctcttggccatctggttatgaagctgtgggaaatatagtttttgtagatcttattgaacatctgttgtcagagttgtccaaaaatgattctatgtcaacaacaagaacctacatacaatgtattgctgctattagtaggcaagctggtcatagaataggtgaataccttgagaagataattcctttggtggtaaaattttgcaatgtagatgatgatgaattaagagagtactgtattcaagcctttgaatcatttgtaagaagatgtcctaaggaagtatatcctcatgtttctaccattataaatatttgtcttaaatatcttacctatgatccaaattataattacgatgatgaagatgaagatgaaaatgcaatggatgctgatggtggtgatgatgatgatcaagggagtgatgatgaatacagtgatgatgatgacatgagttggaaagtgagacgtgcagctgcgaagtgcttggatgctgtagttagcacaaggcatgaaatgcttccagaattctacaagaccgtctctcctgcactaatatccagatttaaagagcgtgaagagaatgtaaaggcagatgtttttcacgcatacctttctcttttgaagcaaactcgtcctgtacaaakttggctatgtgaccctgatgcaatggagcagggagaaacacctttaacaatgcttcagagtcaggttcccaacattgttaaagctcttcacaaacagatgaaagaaaaaagtgtgaagacccgacagtgttgttttaacatgttaactgagctggtaaatgtattacctggggccctaactcaacacattcctgtacttgtaccaggaatcattttctcactgaatgataaatcaagctcatcgaatttgaagatcgatgctttgtcatgtctatacgtaatcctctgtaaccattctcctcaagtcttccatcctcacgttcaggctttggttcctccagtggtggcttgtgttggagacccattttacaaaattacatctgaagcacttcttgttactcaacagcttgtcaaagtaattcgtcctttagatcagccttcctcgtttgatgcaactccttatatcaaagatctatttacctgtwccattaagagattaaaagcagctgacattgatcaggaagtcaaggaaagggctatttcctgtatgggacaaattrtyygcaaccttggagacaatttgggttctgacttgcctaatacacttcagattttcttggagagactaaagaatgaaattaccaggttaactacagtaaaggcattgacactgattgctgggtcacctttgaagatagatttgaggcctgttctgggagaaggggttcctatccttgcttcatttcttagaaaaaaccagagagctttgaaactgggtactctttctgcccttgatattctaataaaaaactatagtgacagcttgacagctgccatgattgatgcagttctagatgagctcccacctcttatcagcgaaagtgatatgcatgtttcacaaatggccatcagttttcttaccactttggcaaaagtatatccctcctccctttcaaagataagtggatccattctcaatgaacttattggacttgtgagatcacccttattgcaggggggagctcttagtgccatgctagactttttccaagctctggttgtcactggaacaaataatttaggatacatggatttgttgcgcatgctgactggtccagtttactctcagagcacagctcttactcataagcagtcttattattccattgccaaatgtgtagctgcccttactccaaggggggggccgggtaccaaattcnccctatagtgantcgtnttacaattcactgggccggtcgttttacaacgtc

SEQ ID NO: 2928 - DNA, 389 bp, Homo sapiens
ggcacgaggtaaatacagatgaagcttcactctctagcctgcacttacttcctactgtgtggcctaacacgccatagactggtactggtttgtggcatgggagttggggacccctgctttatttaatcacttataacttataatcacttagatgctctaagtcatctggggggtgagaaggttggaaaagaaaaagtacattagtgagtgagtaaagattatctgggattgtttcttagatgaggatctatttgatgttggtgttggtctactgtgaactaaatataactgcattggagcctaagcgcagatgtctgcgtcatggtttattactcctgtgttcgtttcaaggagctcctgtgatacctgctgtctccacctaaaaaaaa

SEQ ID NO: 2929 - DNA, 2027 bp, Homo sapiens
gggccattttatccttttctcctacttctgcccaagaracctgaattgctgccatagaggacagtgtttgtktggtctcctgagtccacatcgctcgcttccatggggtcccggtgttgtttttgcctcgttccccataggctgctgcccttatggcctctggactgaactctggggcctttggggtggtgtgaaggagtctgtgggcttcttggaacacatggatctgttcggtgggtccccagacctctgytcccagagctcatggcccaggtggtgaggagggaaaggcagtcagattccaggctggagtgtgattctgtgggaatactggggtcagttatggaacaggacttgcccatcataggtaagtgagacagcaaatagatgattcaagagcaaggattactgcgggaaggtgagactcctactgtccacgcgcatgagcagaacctggaaccagaggggcagggaccaggggtctttactcatttattttatgggtaaagagacatgaagagacagcctctctcttctgtctcagaagctctgtgtttgggaaactttgagcccagtgagtagcagggtctgcagtgtgagtaccaggtttccctggcaatccaggtctcctctgaggaagcattctgacttcccactgaccacggaaggcatgtcagcttcatgcctcgggctagagttctgataatcggggctgaggggtgaaaagaaatccagtcagacagacagtggggagacaggtccctgccctttatttgcgggatcaatcagggactcccagaaaggaaggagaatggtgagaagggccctaagagttcgtctctcacctgggggctggtgacgtggtcaccacaagctgaagacaggctaatggggtggcgggtgtgtgtttaaacctcacgtgcctggaagctgcacattgaccaaaggagggagggaagtgctaaccatgtatagagtgggcaggcggttccagggagacaagcagcatgttattaaattgggcctaggcagttggacgataatggagaaaaagcagggatgctataatgagtcctccccaagggtgagttcarcaccccagccctgttctgcttgtatcccagtgatacttgggaggtaggaagaaaatgggagtaagagaacaatttggggctgaagggagtgtcagaggcacgttgatccttgttttgttgtcatggaaacttcggggctggtgggacttaggccaaaagctcagaggcacagccaaaatttagaagcttgctactcctacgactcggcctataaggaagagagaagctgtctgtactttggggactacattgctgaaggaaaaaaatcactccctggctaattaagattgcttccaaattgggggaatgtgtgtcatttcctttaccaaggccagtcatccctgcttccacccatggtcaggacagtcagccactacgtgatgctgtataaattggattacaaaccatattcttgttcagcttgcactaatctatataaataaaatatgtactttgaaaaaaattaggctacatgagtttcaaatggactgtgatgttatagacctgctttctctttggttctgggccagtgtcagacggggacaggggtgataggcctggtgtcctaggggccatttgtgtaccttgaggccgtgttaacatggcctgggggaaagaaagctctcctgtcacttggagtctcattcctaaaccctccttcccagggagcaagtgtggggcagggtttcagagcacaggctttggtgtccagcctgggtacatccagctgtcccgctgtctaactgacattgtgtgagatgcttactctctctgagctccctcctcctggctcccaactttattataaaatggggaaaatgattgtgcttgccctacagaattgtagtatgaattaaaagtctggatttaatgtatttaatatagaaaattttagcttttattaataaaagtttttggcataaaaaaaaaaaa

SEQ ID NO: 2930 - DNA, 1345 bp, Homo sapiens
  misc_feature (1324)..(1324): n equals a,t,g, or c
  misc_feature (1326)..(1326): n equals a,t,g, or c
  misc_feature (1338)..(1338): n equals a,t,g, or c
  misc_feature (1344)..(1344): n equals a,t,g, or c
ctccagggatgtgatccggcatccttgagtttgctcacagtgcctgtgcaccattcgagaagcccagcccctytccctcaccaccaaaccagaaacccgggcccagctggctctccactctgcgccttcmtgtcggctaaggctgcagcctcctcytctgggcagatgggcagccagcytcccctcctgtcccggcccytcccccttgggtccatgcccacagctctgctggcctctcccccgtccttccccgccacgctccatgcccaccaggccctcccggtgctacaggcccagcctctttccctggtcaccaagtctgcccactaagctccccccgacccctgcaggctgtcacatgactcattgagtagtaatgattcagaagaaaaagaaaaaggagactttattggtcaatatttgaccactctggactgttctgtaaagtggctggtaacaacagcactttacagtttgtagatgtaaccagtagctgatcttaaggcttttttaaaaaacaaaacaaaacaacaaaaaaaaatctttataagaaagagaactgaaaagtagcgtgctattcgtcctgtaggtgctgtggtggatggacctgggcagagggcacttctctctcttacctctcttgcactttctgtctcctgtctcttctcgcccctgccgcctgccccagcttccccgactccatctgcagctctgccattgtgacatttcctgttacccagcccaagttttcatcgtctgctcaataccgtgggttcttcttcgtcctctgtcctctgcccagtgtgaggccatcaccatgtgagaagacatcttggcctgatttgctgccaccagcgtcccctccctcagtgggcccgaactcgccagccccagctttcagtggagaaagcggtcctctgaaatggtttcctcccaacccccgcatttaaagggactcaaggtgcctgccacttcctcagcgaagaagtctgtgttcctccccgtccttgccagtggcgatcatcccttcacaatcccagagtggcaggcgggaccrgccccatggtctggctcctgtcacctgggtccgtgccagcacaatctgccaaagttctagagaccctgttcccttccccatcacctcacatgcttcttctgtgtgtatttctttttgtttttatggtttttggagcaatttaaactcccagttgtttattttcacaaaagaaaataaaattgcagttgcaaaaaaaaaaaaaaaaaaaaaaaaaaaaaaaaaaaaaaaaaaaaaaaaaaaaaaaaaaaaaaaaaaaaaaaaaaaaancnsggggggggggnccgttnc

SEQ ID NO: 2931 - DNA, 1093 bp, Homo sapiens
ggcacgagcggcgccgacgagaagaactgcttctcctgccagcccggcaccttccactgcggtaccaacctgtgcatcttcgagacgtggcgctgtgacggccaggaagactgccaggacggcagcgatgagcatgggtgcctggccgccgtgccccgcaaggtcatcacggcggcgctcattggcagcctggtgtgtggcctgctgctggtcatcgcgctgggctgcgccttcaagctctactcactgcgcacgcaggaatacagggccttcgagacccagatgacgcgcctggaggctgagttcgtgcggcgggaggcacccccatcctatggtcagctcatcgcccagggcctcattccacccgtggaggactttcctgtctacagtgcgtcccaggcctctgtgctgcagaatcttcgcacagccatgcggagacagatgcgtcggcacgcctcccgccgggggccctcccgccgccgcctcggccgcctctggaaccggctctttcaccggccgcgggcgccccgaggccagatcccactgctgaccgcagcacgcccctcacagaccgtgctgggcgatggcttcctccagcctgctccaggggctgcccccgaccccccagcaccgctcatggacacaggcagcaccagggcggccggagacaggccccccagtgcccccggccgtgcaccggaggtgggaccttcagggccacccttgccctcgggcctgcgagacccagagtgcaggcccgtggacaaggacagaaaggtctgcagggagccactggcagacggcccagctcctgcagatgcacctcgggagccctgctcagcccaggacccgcacccccaggtctccactgccagcagcaccctgggcccccactcgccagagccactgggggtctgcaggaaccccccgcccccctgctccccaatgctggaggccagcgatgatgaggccctgttggtctgttgaccgctgggctcgctggtgaccgccacagccccgctttgtaaccagggaatacacagtcatttctaaaaaaaaaaaaaaaaaaaaaaaaaaaaaaaaaaaaaaaaaa

SEQ ID NO: 2932 - DNA, 1300 bp, Homo sapiens
  misc_feature (1086)..(1086): n equals a,t,g, or c
ggcggagcgagttacgagaattcccggccgctgcaaggggtgggagctgccctggggtcakgtgtgagcagtgattactggcatctgggcatgggctgagtgtccattcctctagagccacagtgggctccacagaggtgagtgtggccgtgaccccagatggttacgcggatgccgtgagaggggatcgcttcatgatgccagctgagcgccgcctgcccctgagcttcgtgctggatgtgctggagggccgggcccagcaccctggagtcctctatgtgcagaagcagtgctccaacctgcccagcgagctgccccagctgctgcctgatctggaatcccatgtgccctgggcctccgaagccctgggaaagatgcccgatgctgtgaacttctggctgggggaggcggctgcagtgacttctttgcacaaggaccactatgagaacctctactgcgtggtctcaggagagaagcatttcctgttccatccgcccagcgaccggcccttcatcccctatgagctgtacacgccggcaacctaccagctaactgaagagggcacctttaaggtggtggatgaagaggccatggagaaggtgccctggatcccactggaccccttggcgccagacctagcacggtaccctagttacagtcaggcccaggcccttcgctgcacggtgcgggccggtgagatgctctatctgccggctctgtggttccaccacgtccagcagtcccagggctgcatcgcagtgaatttctggtatgacatggaatacgacctcaagtatagttacttccagctgctcgactccctcaccaaggcttcaggccttgactgatggagcactggtgaacacgaccaagcacgcctcgggggacggagccagcccctccctggccaggtcaattctcgagagagcctggagtgtgcatgctggctgctggccccgggtccagcatggcttgagatcagctttggaggatcttggaatgtggtcataaggactcaaggtgccaggcaggtctgggtgagggttctcaggaagttgccacacaggtgagcagagtggggatcangtgcagcggcacctctccccagcgctgtgatgttgggcgagtcactgcgtctcgggcattggtgtcctgtcagtaaagagataataatggctgtacctcgcggggctgttgtgggcttggagatgatgtctatgaggaccagcatggagctggcacacaggacatgttgaataaaaggtagctgtgartcgtaaaaaaaaaaaaaaaaaaaaaa

SEQ ID NO: 2933 - DNA, 798 bp, Homo sapiens
ggcacagcctgtatgtagctccagctacttggaaggctaagatgggaggatggcttgagcccaagaggcagagcccgcaatgagtggagatcgtgccactgcattccaggctgggcaacagaatgagactctgtctcaaaaaaataaaaaaaaagaaaagataaacagtaaaatggaatcagaggaggaggtaatgccaagagttccactattcattgaaaactaagggagtatgttgtggaaagmgaatgacagcagaagctatgttttctttcttaatttttatctgtcttttgattcttttttcaaaatgagtctagatggtctaagcagaggagatcagaagcatcaaaatggggctggtttggggcagtgggtgtttttctcagtgactgttaatctccagaagcatggcagttctagggccagaggctacgtggcttatcctagagggagtaccttcaggtatacaattatgtcttagttgagggttttaaaaaaattgttgtcaccaggtgcagtggctcatgcttgtaatcccagcactttggtaggccgaggtgggtggatcacaaggtcaggagtttgagaccgtcctggctaacacggggaaaccctgtctctactaaaaatacaaaaaaattaggctctggtggcgcgcgcctatagtcccagctactcaggagkctgaggcaggagaatcgcttgaacccaggaggtggaggttgcagtgagcccaaatcgcgccactgcactccagcctgggcgacagagcgagactctgtcaaaaaaaaaaaa

SEQ ID NO: 2934 - DNA, 1050 bp, Homo sapiens
gaattcggcacgaggcaagattagcacaaagcatactaatgttttttgaaatacacccattgttaacattttgtaccatttgctttatcatttgcactctgtgtgttgggggtctgtgtgtgcagtatgcaataggtttttcttaaaccatgttagagtaagttgcatatatcaaagaaataccttttcccacaaataaacttaagtagttccccaaaataaggatattctataaaaccatagtatagctagcagttttattaaatttaaccttccatattccagttttatcagttgattccataatgtcctttgtggcactttgttactctcgtacatcatcccatccaggatcaggtatttcatttagccctcatgtgtcttcagtcacatttaatctggaacagttcctcagcttttgtctttttttttttttttgaccttgatgtttttgaggaatagtctttgttttaaaatagagtatttctcatattgtccttttttttttttttttttgagacagagcctcgcactgtcactcgggctggagtgcagtggcataatctcggctcactgtaagctcctcctcccaggttcaagctgtgctcctgtctccacctcccaagtagctgagattacagttgcccctgaccacatccagctaatatttctattttggtagaacaaggtttcaccatgttggccaggctgttcttgaattcttgacctcaagtgatctgcctgccttggcttctcaaggtgctgtgattataggtgtgagctactgtgcccagccctaagtaatattctaatgcgttattatgagagaaaatcattcttatagttaaaattaaatcaaaataattagtatgtcattttactaattgtacttttatgtgataaaaccacttttttttaaagttttggattgtgttaatttttcaattcaacatttataatgttaaatactgttatacattcaataaagtgttattatgccactaaaaaaaaaaaaaaaaaaaaaaaaaaaaaaaactcgagggggggccc

SEQ ID NO: 2935 - DNA, 1040 bp, Homo sapiens
aattcggcacgagtgaacagtragactgtctcaaaaaataaaggtgtacagggattgtatatttgacaacttggtatgtaggatgtgctacctctaatgttccatgctgttacttagttttcactcactactatattttggagatttgttcatattgctctgtgtacatttaattcttcagtgtgtatccaccacatttaacttattcacttacagaactatgcaagaatttctctggtaaatttcactaagtacttatgtacttttcagaacgattgtgagtttacacccctaccagcaggactgagttgagtacccatttcctcacatccttgccagtacttcatttgcctaatttttgccattctcataatgtggcaattgttcaattttgcattcttccattttatttttttgcatctctgcttttcttttggttagctttgccagttctgcctattatattaatctcccagaatcagcttttagttttgttaaatctctgacatgtttcgttgattcctgctttcatcttaaacatttcttcgttgttaatttgtgtttgctataaaataagcaacatcttaaatgcttgattkgctttcgatgtttattctgtaataagatatttaaagatataatttttccctaaatgctttattagacttttctcataagttttgactggtactgttttcattgttatttaattttgtgttttttaacttctttcatgatttccttttaactgaaggttttcttagatatttagtttgctggtatattcttttaaaattgtatcattgctttctttctatattggattattgtcagagaacatgatttgcatgatattaactttttggagtatattgttgcatctttgtggcctagtacatagttaatttagtgaatgcttccagttgtacttgaaaagaatgtatattttctgattattgagggtaaatttctctatatatgttttcctgtttaataaatatgtagctatgtgcttaaaaaaaaaaaaaaaaaaactcgag

SEQ ID NO: 2936 - DNA, 2364 bp, Homo sapiens
  misc_feature (65)..(65): n equals a,t,g, or c
  misc_feature (89)..(89): n equals a,t,g, or c
  misc_feature (134)..(134): n equals a,t,g, or c
gcgagagctgcgtgttgaattcgccgccgagaactatctgagcggcggtggcccaggggacggangtggcgcggacaccgggactggangggaggaagtcgaggccctgcagctctcagctcgttggctggaantgctgcgcacctacttggagctggtgctttgcgtgctggtcagcatccggaacaacaggaaccttcagaagtttagtctttttggagacataagtgttctacaacagcaaggaagtttgtcaaatacatacctcagcaaggtggaccctgatggcaaaaaaattaaacaaattcagcaactgtttgaagaaatcctgagtaatagtaggcaactgaaatggctgtcctgtgggtttatgctggaaatagtaaccccaacatcactgtcatctctctctaatgctgttgccaacaccatggagcacctcagtttactggacaataatattcctggtaacagcactcttattactgcagttgaactggagcgatttgtgaatctgcactcacttgccttggatttttgtgactttacagctgagatggcaagagtcttaactgatagcaaccatgtgcctttgcaacgactgtctcttctggttcacaatgtttctgtaatgcacaagtctctggacaacatgccaaatgatgagcattggaaagccctgtcacgaaagagcaccagctttcgggtctatataatggcttttgatatcaagagtgaagatatgttaaagattctgaaacccagtataccactagagaggattcattttgatagctatatcacttgtgtttcaggggctattgttgatcttatatccaggcaatatgacaagttcctcactcattttattttaatgaatgatgtgattgacacatctggttttccagatcttagtgacaaccgaaatgaagatccgttggttttattagcatggaggtgcacaaagctctctcttctggcaattcatggttacacggtgtgggcacacaacctcattgccattgctcgtcttcggggctctgatctgaaagtgcttgaagtcaccgaagaaagcattgattttgaccaaggtgaactggccgaccaggatgtagatccagtgcataaccttattgagcaggtatccctgggcctgggtcaaccttggcatgcagtcatggacatcgaatcactcagtgtcttcactgaaccaaatcgtcatttttacagagagatgcaaagcttcagtgaagacatttagcttttttttaatgtagaattcctgtggttacatatgcaagtagggtcctattatgtttttttttcagtagtgtgaattaatccttttgtgctgtgtttaatcagtattagctttatagaattatatatgtatattctacttcttgatcaaagaacgtagtcgggtattggtttagaagttcaaagtgacaatgtatagggctttcacggttaatggacttgttaccaaaccttaaggatatacagccgaagattgtctgaggttgctggctaactttatttttcactgagttactctgcctttttgacgtttttattctttgtgtgtcagagttcagagctcaggagccaaaatatttttatacatatatagatatatatccatagcctggtagatttatatgcaatgcactgcatccatgcattctgatagcatttcattaattttgatttcaaatggaagataaataatatcccaaatgaattatctgtaacagaaaagccaagactttaactttcattacatatctaatagttgatatcaccagttaccattttgaattttgtatagtactaggttagaacattgcttaatccttttaaaaaaaatgcatttacgtaaacacgaatactgaaattgttggattttttaactatatctgacataattttattcatcaattacattacacattcatttagcccagatttcaaatagtgggggaagaaagaaactgtatttcagagtaaaatctcctaaaggaaataaaaacacagagttgtaaatacacatgcttgcaaaaacattagtcgtgaaatccctagcaacaagtcactggatttttctctgtcagcacgcgtgtcagctgccaaagaatagacttaatgaagaagtgcccacatgctggcaggggccggcccactctggccagccagatactgctagattgtaatatttaaggtcgaatttcgacctgtggtacacagctgtgctgtggctcagtcagcaacctcagaactctgaaaaaacaaaacaaaaaaaaaaaaaaaaagaaaaaaaaaacatgcacctgtttcactgtgaatagtgaatgtaaaaaaaaa

SEQ ID NO: 2937 - DNA, 524 bp, Homo sapiens
  misc_feature (4)..(4): n equals a,t,g, or c
  misc_feature (37)..(37): n equals a,t,g, or c
aaantaaccctcactaaagggaacaaaagctggagcnccaccgcggtgkcrtmsgcwmtagwwccggtscacgwccctracttcgggcttgttcgctggtggcgtcggagccgagccggactggtcaggatgatcacggacgtgcagctcgccatcttcgccaacatgctgggcgtgtcgctcttcttgcttgtcgttctctatcactacgtggccgtcaacaatcccaagaagcaggaatgaaagtggcgctttctccgccccagggttccaggacatagtctgaggcaagatggagggtatgaggggccttcacacttcacttcatcccttcctacccatcacaacatacaaagcaactacacctggatttttccaaacaacttttatttcctcagagtcttccttaatcctatggaacaagaagctgccactgaatagggcccagtataggggcttgcttttctactccctccccccaatataaaaatatagacttttaaaaaaaaacaaaaaaaaaaaaa

SEQ ID NO: 2938 - DNA, 711 bp, Homo sapiens
gttctatcagttattaagagaggactatcgaagtccccaatgataattgtggatttgtctgttattttttgtagttgtatcagtttttatttaattgattttgaacctttcatgctaggtgcatagacctttaggattgtcatgtcctcttagttaactgaccccactatcattctgaaatgaacttccttgtattctttgttctgaaatgcattttgtctagtataaatatagctgctgcagcttttttgggctagtttaactatggtatatctttttcatccttttactttttatgtatttgtgtgtttatgtttaaagtgcatttatcataggcagcatatagttggttcttgcttttttatccaatttgacagtctctgccttttaattgatgtttgggtccatttacatttaatgttattatcagtatggctaggtttgagtctatcatcttgctatttgttttgtatttgttccatgtatgctttgttcccttttctccctttttctgccttcttttggattactgttttttttaatgattccattgttttttcttccttgatttattagctgtacctcattgttttattatcttagtagttgctttagagtttatagtataaatgtttaacttcctcctcctggctttcatgctagtgtcataaattttacttgtagattttataaaccttaaaaaaaaaaaaa

SEQ ID NO: 2939 - DNA, 1992 bp, Homo sapiens
gcatcctccgccaggacagagtctccaaaggctgctactccttcatccacctcagcttccagcagtttctcactgccctgttctacaccctggagaaggaggaggaagaggatagggacggccacrmctggkacattggggacgtacagaagytgstttccggagtagraagactcaggaaccccgacctgatccaagcaggctactactccttcggcctcgctaacgagaagagagccaaggagttggaggccacttttggctgccsgatgtcaccggacatcaaacaggaattgctgcgatgcgacataagttgtaagggtggacattcaacggtgacagacctgcaggarctgctcggctgtctgtacgagtctcaggaggaggagctggtgaaggaggtgatggctcakttcaaagaaatatccctgcacttaaatgcagtagacgttgtgccatcttcattctgcgtcaagcactgtcgaaacctgcagaaaatgtcactgcaggtaataaaggagaatctcccggagaatgtcactgcgtctgaatmagacgccgaggttkagagatcccaggatgatcagcacawgcttcctttytggacggacctttgttccatatttgggatcaaataasgagatgggtctagcaatcaatgatagctttctcagtgcctccctartaaggatcctgtgtgaacaaatagcctctgacacctgtcatctccagagagtggtgttcaaaaacatttccccagctgatgctcatcggaacctctgcctagctcttcgaggtcacaagactgtaacgtatctgacccttcaaggcaatgaccaggatgatatgtttcccgcattgtgtgaggtcttgagacatccagaatgtaacctgcgatatctcgggttggtgtcttgttccgctaccactcagcagtgggctgatctctccttggcccttgaagtcaaccagtccctgacgtgcgtaaacctctccgacaatgagcttctggatgagggtgctaagttgctgtacacaactttgagacaccccaagtgctttctgcagaggttgtcgttggaaaactgtcaccttacagaagccaattgcaaggaccttgctgctgtgttggttgtcagccgggagctgacacacctgtgcttggccaagaaccccattgggaatacaggggtgaagtttctgtgtgagggcttgaggtaccccgagtgtaaactgcagaccttggtgctttggaactgcgacataactagcgatggctgctgcgatctcacaaagcttctccaagaaaaatcaagcctgttgtgtttggatctggggctgaatcacataggagttaagggaatgaagttcctgtgtgaggctttgaggaaaccactgtgcaacttgagatgtctgtggttgtggggatgttccatccctccgttcagttgtgaagacctctgctctgccctcagctgcaaccagagcctcgtcactctggacctgggtcagaatcccttggggtctagtggagtgaagatgctgtttgaaaccttgacatgttccagtggcaccctccggacactcaggttgaaaatagatgactttaatgatgaactcaataagctgctggaagaaatagaagaaaaaaacccacaactgattattgatactgagaaacatcatccctgggaagaaaggccttcttctcatgacttcatgatctgaatccccccgagtcattcattctccatgaagtcatcgattttccaggtgtgggtgaactgcctgtgactcctctcctcccccgcccctacccctcagggataatgagttcattgctgggctagatgttttagccatgattctgcctctgttttatacctgcacacgtccttatctttgttacatatgaaatatctgtatcacgggtatattgagagaaataaaggtgagagcattcacaaaaaaaaaaaaaaaaaaaaactcgag

SEQ ID NO: 2940 - DNA, 1161 bp, Homo sapiens
ggcacgagcggggtcatcgggatgatgcggacgcagtgtctgctggggctgcgcacgttcgtggccttcgccgccaagctctggagcttcttcatttaccttctgcggaggcagatccgcacggtaattcagtaccaaactgttcgatatgatatcctccccttatctcctgtgtcccggaatcggctagcccaggtgaagaggaagatcctggtgctggatctggatgagacacttattcactcccaccatgatggggtcctgaggcccacagtccggcctggtacgcctcctgacttcatcctcaaggtggtaatagacaaacatcctgtccggttttttgtacataagaggccccatgtggatttcttcctggaagtggtgagccagtggtacgagctggtggtgtttacagcaagcatggagatctatggctctgctgtggcagataaactggacaatagcagaagcattcttaagaggagatattacagacagcactgcactttggagttgggcagctacatcaaggacctctctgtggtccacagtgacctctccagcattgtgatcctggataactccccaggggcttacaggagccatccagacaatgccatccccatcaaatcctggttcagtgaccccagcgacacagcccttctcaacctgctcccaatgctggatgccctcaggttcaccgctgatgttcgttccgtgctgagccgaaaccttcaccaacatcggctctggtgacagctgctccccctccacctgagttggggtgggggggaaagggagggcgagcccttgggatgccgtctgatgccctgtccaatgtgaggactgcctgggcagggtctgcccctcccacccctctctgccctgggagccctacactccacttgggagtctggatggacacatgggccaggggctctgaagcagcctcactcttaacttcgtgttcacactccatggaaaccccagactgggacacaggcggaagcctaggagagccgaatcagtgtttgtgaagaggcaggactggccagagtgacagacatacggtgatccaggaggctcaaagagaagccaagtcagctttgttgtgatttgattttttttaaaaaactcttgtacaaaaaaaaaaaaaaaaaa

SEQ ID NO: 2941 - DNA, 1255 bp, Homo sapiens
ggcacgagctcattctgttttcttcatctttccctgaccagaaatgtttgcaacacaaggacattcctgtccccaagggctttctgacttcctccttctggcgctcctgatgtcactccatcacccaccatcaccgctgctgcaaagaggcaataataaaggaactgaagacagctgtatttgggagaagtcatgtcagattcagaaatttgccattatgtatttttatgtatttatgccttgtgactaggagaggagattttcatgggtcacaaaattcttggaggtcccttagtagatttggtagttccttaagagatccacgtgataaaataaatggagttggcctttcttgttttttgcaaaagtgataaaaggtctttagcacttggtctcctcccttgtctctagtgtctttcagaaaagttggcaataccttaacaaatgcactctgagctggagggagcccaccatttgcacccacctgacccaccctcacccctgttcagatgaatttccaaaaagagctaaggctcataaggttcccttttaagtattatttaatagttgaggccagatacttacatgcaagtctgggttatggttgttttgcctttctcagcttgtgaagtcattctaaagctagaggaagtatgtgatatacacatggactaaggctcaggtgacactatggctagattaacatctgggattaggactggaaacacatgtcattttgaactaagggaaactctttgtcatcctaatttggaatttggtccctggatggctagggatccatgaaccaggcaggtaccttttttgtttttgttttgttttgtttcttttctgtttgaattaagatgggctaagatggggcttgcaacattaaacatgagctgagcatccataagcattgaattgggattaaataaagatgttgggcaggaactgaacactgctaatatgatgataaatatgcctgactaaagccactacagaaatccagagattggctgttaaaatttgttttgtggaaagactaattctctttgatactgcagaggcagtggccatggatctgttcctctgtgctaaatgtcttgtggcagggtgtgtttgtgggggagtgttccactggtactcttgagtggcctgaagtgacccattctatgaattgttaattaaggtgccaaaaaaaattaataataaagcttggttttttgaaaaaaaaaaaaaaaaaaaaaaaaaaaaa

SEQ ID NO: 2942 - DNA, 2204 bp, Homo sapiens
ggcacgagattttttgtaagtcctacaagtacaaggtttttataagtacagcgttccaagtacctgggcactctggttggcttcagttacagctcacacaggctgagtcatctctgcctatgtatctatacaagccatttcacatccatagtaccaatacttttaaggtcaaaaacaagatgaatctgaatggtggcctttttgtcctccaccaatccctgtttctaccttcatcaaactactctgctgtttgcacttcctcacaacttcccttgctgcttatatttcttttttcccctcaggtgtctctccttcccttctaactggcagcagcccccttcacctcaggagcgggctttagatccgctctgccaggcagcttgctaacttctgtgtagctctctgaagcaggtagagaaatgttttgctaaatgcatgccgctcccactgcctttctagtcctaaccctcaatgttccttagttgtttgccttgtttcctacaatttcagctaaaactattgctcagtatgcagtattatgctacagtgtcccttgcaagtacttgttagtttgtgcagtgcttctgagatgtaattaaatgtttatgcaatgtttaaaataaactctagagggctaaagccattaatatgcccataggacacatctcgataaatgctggcgtatatggcattttcatgcaatagaaactgttagaatcaagggagaaatataagactaaaatatcagtaccctttcacatagcattcttgttttaacctatgacagatggatgtccagagccttttctttttcagagtccttggtttagcaacccttgttcgtttggtgttacttgttataatagcatttctttgcaccaaatgaaaataggttagtttgagtgttgacagaagtgtttatgttgaattttgtcacatatgacttttggatgagctgagtgtagagtttcttttgtctgtctgtttccattttttccattcgacatagttcttttcagtgctcggaattttttgaaagattgaatttcccaaatgtaagaaagaaaattttatccatatttccacaccagtgttactgtccagcatacattttgaaatgatttctagtctatagtgtaggcaaacatgaaaatagtactatgtagctgtttattaaggtatagatgtaatttaggtaattgaaatagatgattagttttgtgtgatggagtgcctgagcaggttctgacatttttataaaggtcaatgttttcacttgactgctttctagaggtgtgtgtttacctttctctcttgcaggacctggagttgctggctaccttaccgcaggtacatctacatcagtcatgtctaacctgccacctcctgtagaccatgaggcaggcgaccttggctatcagacttgaaatattcacgagagacaataaacgctgaaaggccagtgccaagtccacattcctccagctgatacgttgaagcaaactcttactgcctttctcctggtttcatgacagtgttattcctttttctataaatatatttttaggaaaaaaagtcagtgatcctaattgtatcacattataagaaagcactctgtggatcaacataagtgggtacacaagaattttttttttcttggtgtatgtaagcacatttgttcctttatatctgtttacaaaactgtgaatcaaaaagacagaactttcttcctagtttttgtaattttttttttgaactagcatgactgtagggttgagctacagtcaacaaaaattgggctaagtcacttttccccaggaaagaatatttccctctcctgcatcaagtctgcgtggccatcctccccccaccatccaagactattaggttttgtccctgcacccttcactggcatcctcaatcattaaccttctgaaagctcacagtacacattagtatgtataactggctttaccaaattgaatgaaaaggagcttgtgcaaaaaaatttaaaaatggatgtcaagatgttatgtaaaagatgagtgtaattgtgaaatgttctatacactatcaaatatataaagctttctatattgaatgtacattatacagatcattcatatgtgtacataaaattttaaaaataaagggaattgactgctttgttaatgaaaaaaaaaaaaaaaaaaaaaaaaaaaaaa

SEQ ID NO: 2943 - DNA, 1409 bp, Homo sapiens
ggcacgaggaaaaacttttggtactgtaattaatatattaaaaaagaaacattctgatttttttctggtctggctttttttctgtataattaaatgtaaacctaacaaggtttaattaaatttagtttacagctgttgcggcaaaaatgcaaaaagcaaattagagggaagaaaatatggtgtatgctttgtagacagatgggactgaatctctgttatcccaaaatgttcttttattattggtacattttatcagtaaatcaaggatagataccaaatattaatgtacacatgagccaattacttctaactagatttttctcttagtatttttttatctgtttcattattagtttatcagctccaaattagcatatccaaatgagttacccagcaatagataaattgcttttgattttgtgtcataattaatatttttatctagtcatttatctatcattttagaaactagccaagtctatgtgagtcataaaagaaaaatgaaaattatttactattagttaaattacagtggttgctttgagcaggttcagaggcttaagttcttcacaatctcttactacatgattgctgttttttcttccacagctttgtcatttactcagtgctgtggactttcaccatcctgatattaaaactgtgcaggtgtccacagtagatgcttttcagggagctgaaaaggagatcattattctgtcctgtgtaaggacaagacaagtaggattcattgatcagaaaaaagaatgaatgttgcattgactagagaaagagcatttgttgattgtgggaaattagcctgtttgagaaaaatcaactttggggacgagtgatccaacactgcgaaggtaaaataaaaatgggtttaattcatgcatttcaagttcaaactgacttttatgggttaatgcttggggtgcttcaagcaggaacagctctgctgggggaagtaactgacatgataatattgggacctctgtaaaataaagaatagttgtctcatgtcgtatgtttttttaaggaagggaagatggattgcaacatgcaaaccagtatgaaccacagctgaaccatctccttaaagattattttgaaaaacaagtggaagaaaaacagaagaaaaagagtgaaaaagagaaatctaaagataaatctcattcataaaaagacatggtgtaaatattttgtatttatgtaaattcagactcattttacatgatatattttttatatttttattactctaaaccctcttattaaaaatatgatatttaaataacatagtaaacacatgtaaaaattttgttcttcaaaaaagtgtacaaaaggtagtataaaatcctactaataaaaataagcttttttctaagaaaaaaaaaaaaaaaaaaaaa

SEQ ID NO: 2944 - DNA, 2389 bp, Homo sapiens
  misc_feature (314)..(314): n equals a,t,g, or c
tccgggctgccttcccccttggcgccctgacccagagccacaccgggagctaccactgccattcatgggaggagatggctgtatcggagcccagtgaggcacttgagctggtggggacagacatcctccccaaacctgtcatttctgcttcccccacaatccggggccaggaactacaactccggtgcaaaggatggctggcaggcatggggtttgctctgtataaggagggagagcaagaacctgtccagcaacttggtgctgttggaagagaagccttctttacaatccagagaatggaggataaagacganggcaattacagctgccgcactcacactgaaaaacgccccttcaagtggtctgagcccagtgagccgytggagcttgtcataaaagaaatgtaccctaagcccttyttcaagacatgggccagccctgtggtcamccctggtgcccgagtgaytttcaattgctccamcccccaccagcatatgagctttattctttacaaagrtggaagtgaaatagcatccagtgacaggtcctgggcaagtccgggggccagtgcagctcactttctaatcatttcggtgggcattggtgatggagggaattacagctgccgatattatgacttttctatctggtctgagcccagcgaccctgtggagctcgtggtgacagaattctaccccaaacccactctcctggcacagcmgtcctgtggtgtttcctgggaagagtgtgatcctgcgctgccaagggactttccagggcatgaggttcgccctcttgcaggagggagcccatgttcccttacagtttcggagtgtctcagggaactcagctgacttccttctccacactgttggagcagaggactctgggaactatagctgtatctactatgagacaaccatgtcaaacagggggtcatatctcagtatgccccttatgatctgggtgactgacacattccctaagccatggttgtttgctgagcccagttctgtggttcccatggggcagaatgttactctctggtgccgagggccggtccatggagtaggatacattctgcacaaagaaggagaagccacttcaatgcagctctggggatccaccagtaatgacggggcattccccatcaccaatatatctggtactagcatggggcgttacagctgctgctaccaccctgactggaccagttctatcaagatacaacctagcaacaccctggaactcctagtcacaggcttactccccaaacccagcctattagcccagcctggtcccatggtggcccctggcgaaaatatgactcttcagtgtcaaggggaactgccagactcaacatttgtcctgttgaaggagggggctcaggagcctttagagcaacagaggccaagtgggtacagggctgacttctggatgccagcagtgagaggtgaagactctgggatctatagctgtgtttattatttggactctactccctttgcagcttcaaatcacagtgactccctggagatctgggtgactgataagccccctaaaccctctctgtcagcctggcccagcaccatgttcaagttagggaaggacatcacccttcagtgccgaggacccctgccaggtgttgaatttgttctagaacatgatggagaagaagcacctcagcagttttcagaggatggagactttgtcatcaacaacgtagaaggaaaaggcattggaaactacagctgcagctaccgcctccaggcctaccctgatatctggtcagagcctagtgatcccctggagctggtgggggcagcagggcctgttgctcaggagtgcactgtagggaacattgtccgaagtagcctaatcgtggtggttgttgtagccttgggggtagtgctagccatagagtggaagaagtggcctcgactgcgaaccagaggctcagagacagacggaagagaccagaccattgcccttgaagagtgtaaccaagaaggagaaccaggcacccctgccaattctccttcatcaacctctcagagaatctctgtggaactgcccgttccaatataataatctcctcctttacaagagctttcctctcctctctcttgctctcagagacctataaatccaaccagttaccctgcaagtcagccccatctgctgttccttggtctctaatcacctgagctgggtaaaggggattctgggagttgagagctctgccagggtgagatgtttcctgaagagaggttccccacccctgtaactcctcactgtactgatttactggcgcatgaaattctattaaaaatgcattcttctgaataaaaagagtattcactatttaacttcaaaaaaaaaaaaaaaa

SEQ ID NO: 2945 - DNA, 1338 bp, Homo sapiens
ggcacgagctgctgctcatttttctaaaaaatgttttattggaacacaattatgcccaattgtttacatatcatccttggctcttttcttctcataatatttactgtctgtatgtttataggaaaaggtttgctttagcttatgcatagacaattattttaatgtcactattaaaaacaataatttcttaatagtttaaatatcacatttacatagattaatttccaatcatgcatattgttttgtaccactactatttgttttgttctctcatctgtttattcctgtgtcaatactgctcttataatacctttgtgtacatttaaaaccttgaaaagcaaattacttttcattatttactttcaaattttttctaggaatttcccatgcatttattttttacataaagtttagaaaaaaaatttccactttaaaaaactgagatcctgattactgttatagtaagatgacatatcggtttaaataaaattggaaatattgtgatattaaaagtcttccaatccagaaacatgctatgtctttctatttattcatgttttagtttatgtccttttataactttttatagctcttttcatgtaggcctactaattttaagttaaatttaatctatgatattttgtagtttttactactttttaaaatgagattttccttttgcatacctatttctaacatgaaattgttagcattaaaatctagctagtcaacttggattcagccactttaccaaattgctttattattttaagcacgtttttagtagtcttttatattttttaggcaagccatcaaatggagatatttttggtttttgactatgggaatagttactgttcctgttttttaatcatgatgactttcatatttcatctttgttactatgtttttacttggatattgttaattatacttttccatgtttagactgtttcttctattcccatgtcactatgaattttaattaggaatgtcttctaaattttattcaatacgattttagcacatgttgatataatcacgtattttttgcttttttctctttaatttgtttatataataaattatattgagaaatttacttaatgctgaaccagtagccatggagtatactttacttagttaaaaatgtgacattctaaaatatgatgctgtattattttgaatataatttattaggaatttttatatctatcttgaaaaagaaactggctatagctttctgtgatagctttatcaagttttgatatcttggtctatgtcttgagagaatttaaataaaggataattgctctgaacaaaaaaaaaaaaaaaaaa

SEQ ID NO: 2946 - DNA, 1081 bp, Homo sapiens
ggcacgagcctaaacatacgttcacctgcatgctgcttctgttctggacctttgcgctggatgtagtcccaacagagtggcttgctgggaggagggagatacttttcagataaggcactagcacttcatcctaacaacttctccatactgaggcaacatttttaaatacacagagaatgcctaggattcaattgttgagaaaaattgatgtaagtctgtttgtctcaaagaaagctatcaggaactacagttttattaacctaaatgtacacctggtttgatgatgactatgtaaatgtatttttagctaattaatttattatttctgcccatcagccaacgagtggataaagaaaatgtgatatatatgcactatggaatactaagccataagaaggaatgaaataatggcatttgcagcaacctagatggagttggagaccattattctaagtgaagtaactcaagaatggaaaaaaaaatatttggaattgaggtatctaatagagaactgagttaaattattgccacttaaaaacacaaagtgatatagccactttgtgaattaatcagtcagcagtggctaggttatgcttagtggtttataaccaaatcttagtttataacaacaaatgtgtattgttaattcccactacaagtttataacgacattgctggatgctacactccatgtctctttgtgggacccaggctcatgggacttctgttatctgcattagagagagagaagacaacaaaatatgcactggttcttgaagctttggcccagaagtaaaatatgtcttttacctgttcacattgcattgggccagggcaattatcatggctgcaagtaacttcaaaaggatggggaagtgcgatcttggcatgtgtcagaagaaatgaaaacatttggtgaagagcattaatgactgtctttacaggaaaaaagcaatcaaatagacatgatttcttgtttcagtttcatcatttcctactgtgttacctaaactttctgagccccagtttcttattactaaaataaaataatgataaagatgaaaaaaaaaaaaaaaaaaaa

SEQ ID NO: 2947 - DNA, 1877 bp, Homo sapiens
  misc_feature (854)..(854): n equals a,t,g, or c
  misc_feature (1422)..(1422): n equals a,t,g, or c
gaattcggcacgagctgaattccatgtttcattactgggtagaagttacagaacaaatggatttagcttattataaggagaagttttctaattgttagaatttacatatctgtggaatgaggctatttgtcaaactagagagttctttttcccttaaagatgtatagtaagagcagtgcgaacatctcacaagggatgttagatattcttctgtggatagatcttgcacatgatgacctcctgggctctcccagccctgtgattctgagatcacatgcccattcaggaatcctcactgtctagacccatccactaaaatgaatcatcatcttattcacatctaagccccattacmagtttattagtatcatccctttcagtggaaatgcgaaatattttattcagttatgctaatgtaattagctcataatgtcaaatgcttgagaagttgaggttgtagttctgctgggtatttgtttctcatgtcaaatatcataccatcagtgaaattgttcataaccaccaaaattaacaattagccccttcagcccctcttccacctttatcatatttatttgcttaacaaatttatcttttttttttttttactcattgattctgaatctccctctatttaaatgtatattctgtgacagcagtcctcaacctttgttgcaccaaggaccarttttgtggaagtcagtttttccacggacaggggcagaacaggggatggttttgggatgaaaccgttccacttcagatcagatcatcaggcattagattctcatgaggagcatacaacctcaattcctcrcatgtgcagttcataatarggttcgtcttcctatganaatctaatgccaccactgatctgacaggargcggagctcaggtggtamtgcaagcagtggggagtggctctgaatacagatgaagctttgctcattcaactgccactcacctactgctatgtagcccagttcctaacaggcttcagaatgggggatgggaaccctggttctatgagagcagaatccatgtatctttttgtaccactgaatcccaagcatttcgtgttggtacatttttctgtaagggaatccgtgtcttttgttggcttttaaaatggccacctaaaaaaatttaggaactactataagagtaatgttgtcaaaatcaaataccactgttgagattttgaatctgtgaaggataattgcattcttaatattttgtcttcccttccaaaatcatgctagttagtatttcttcatttattcaagatttcttttatgccaaatagtaaattttggtaattttctttatataggccataaacatgtattattaatttaatttcttggtattttttaatctactaatgggtctactaatgagctttctcaaaggaaggagagnagggaagaagaagggacattggaaaaggatatacagaatatttttatcagtctaggtaaaggttaacttgcctctggtaatctcatttttttaagttctttaagcatatagataattaagaaaataaattggctaggcactgtggctcatgcctgtaatcccatcactttgggaggctgaagtgggtggattgcctgaggtcaggatttcaagaccagcttgaccaatatggggaaaccccatctctactaaaaatacaaaagttagctgggcatggtggcatgcgcctgtagtcccagctattcaggaggctgagacaggagaattgcttgaacccggtagaattgcttgaacccgggaggcggaggttgcagtgagccgagatcatgccattgcactccagtctaggcaacagggcaaaactccatctccaaaaaaaaaaaaaaaaaactcga

SEQ ID NO: 2948 - DNA, 1352 bp, Homo sapiens
  misc_feature (1333)..(1333): n equals a,t,g, or c
  misc_feature (1341)..(1341): n equals a,t,g, or c
  misc_feature (1350)..(1350): n equals a,t,g, or c
atcgacccacgcgtccgagatcctgcctcaataaataaataaataaataaaaataaagtaaatggaattacacaatatgtgcttttggtgactggcttttttcactttgcatgttttcaaggttcatccatttgtttggtgttttaaatcttatgtggttgagtttggtttcatgtcagtgtttatttgccttttgttttcaaagataagaccacttaaattattagattatttgaattctccttaagttataagtctggtcctgctatatcagttatctaagtatttagaaatggtagactaggggacctaggtttcttaaacttttctctcttttacttaggtgtgcaatatgaataaaatatcagtagatttgtattttagaaaatgggggatacaagattggggactttattgacacatttaattctttcatgtgtaaaattacttatgtgaaaatgtgattttcttgttttttccccagactaaaaagtttttgttaattattatgagtatttctatagttggctgtttttacctggcaagaatgcttttctgctcagatgaagagataaaggcattaggcctgggatggacatttctgagtgaattaatgttggattggtattttttttatgagtggaagagacaaactatcttacatccattggttttaaaacattttttaatttcagtatatatatgtagagaaaagtacacatgtcataagcctatacagctcaatgaattttaagaaactgaacacacatgggtaactagcacccaaatcaggatatataaactgttccttgcattccaaaagccttcttttgtgcttctttccagtcattatcctttctccccaaaaaggagtcaacaccctgatgtctaacagtatagaatagtttagttcatccatggatgcagtgagccaagatcacgccactgcactccagcctgggtgacagagtgagactctgtctcaaaaaacaaacaaacaaacaaaaaacaaaccgaaaatattagtctgtaaagattgatcttgagcctaaacttttagatgttttctatcctttgaacaaatgcttctgtatcttaagcttggaaggacactgggaaactaaacacttttaaaaggcacttttctttcaatagcccacttataaagtttgctttatctaccagtacaggggaaaaaaagaataaagttggttttattccatttaaagtagttttggtatttctttgctccataccaaagtcttcctcccccaaaataaacaagtgaattagaaccaaaaaaaatcaaaaaaaaaaaaaaagggsggccgcnctaagggncccagcttncg

SEQ ID NO: 2949 - DNA, 773 bp, Homo sapiens
ccacgcgtccgggaaagtttatgtaatatatcttcagttacacacaaagaagcagagctgagatttgaactcagatgcatgaattcttaatataagttccatgattaagtttcagtagctatttgggaactcagtcatggggaaaccaccaactcatgaagcaatccattctgttgtaaaatggctactaattgttacaaaattgttacgtttgagtcagatctgtttccttttgtttcctttatttctgtttctaacttctgggacccgactgggaataaggttgatcttcttctgtaaaacagctgaattttttatattcaacatacattttataatcagaaaaataatatatactatttcttaaaaattagttttggggctgatgacaaacatatttataagtcacatatttatttctgaaggttttaagtgagtaaacctggactttaaaaaatgttgggccatgtgtggtggctcatgcctgtaatcctaacacttggggagggtgaggagggaggattgcattaatccaggagtttgagaccagcctgggcaacacagtgtgacaccttgtctctacaaaaaactaaataatcagctgggagtggtggtgcatgcctgtagcccccgctattaaggaagctgggatgggaggattgattgagcccgtgaggttgaggctacagtgagctgtgatcgtgccactgcactctagtctgagcgacacagagagaccctatttccaaaaaagagagaaaaaaaaaaaaaaa

SEQ ID NO: 2950 - DNA, 1667 bp, Homo sapiens
  misc_feature (1659)..(1659): n equals a,t,g, or c
  misc_feature (1664)..(1664): n equals a,t,g, or c
tgggtggtgctggacctcgggcggggccgggcctcgtggcgggaggaggcagggcagggcctctgggacggggctggacggcttgttgacggaaacgagcccttgacgctgtggcccggaagtggagcggctgtcgcagtgcggctccggcagtggcagcggaggcctgtgtttgcggccttcggcaagcgactgagatggcgagcgcaactgcacctgcagccgcagtccccaccctggcttcgcctttggagcagctccggcacttggcggaggagctgcggttgctcctgcctcgagtgcgggtcggcgaagccaggagaccaccgaggagtttaatcgagagatgttctggagaagactcaatgaggcagctgtgactgtgtcaagggaagccacgactctgaccatagtcttctctcagcttccactgccgtctccacaggaaacccagaagttctgtgaacaagtccatgctgccatcaaggcatttattgcagtgtactatttgcttccaaaggatcaggggatcaccctgagaaagctggtacggggcgccaccctggacatcgtggatggcatggctcagctcatggaagtactttccgtcactccaactcagagccctgagaacaatgaccttatttcctacaacagtgtctgggttgcgtgccagcagatgcctcagataccaagagataacaaagctgcagctcttttgatgctgaccaagaatgtggattttgtgaaggatgcacatgaagaaatggagcaggctgtggaagaatgtgacccttactctggcctcttgaatgatactgaggagaacaactctgacaaccacaatcatgaggatgatgtgttggggtttcccagcaatcaggacttgtattggtcagaggacgatcaagagctcataatcccatgccttgcgctggtgagagcatccaaagcctgcctgaagaaaattcggatgttagtggcagagaatgggaagaaggatcaggtggcacagctggatgacattgtggatatttctgatgaaatcagccctagtgtggatgatttggctctgagcatatatccacctatgtgtcacctgaccgtgcgaatcaattctgcgaaacttgtatctgttttaaagaaggcacttgaaattacaaaagcaagtcatgtgacccctcagccagaagatagttggatccctttacttattaatgccattgatcattgcatgaatagaatcaaggagctcactcagagtgaacttgaattatgacttttcaggctcatttgtactctcttcccctctcatcgtcatggtcaggctctgatacctgcttttaaaatggagctagaatgcttgctggattgaaagggagtgcctatctatatttagcaagagacactattaccaaagattgttggttaggccagattgacacctatttataaaccatatgcgtatatttttctgtgctatatatgaaaaataattgcatgatttctcattcctgagtcatttctcagagattcctaggaaagctgccttattctctttttgcagtaaagtatgttgttttcattgtaaagatgttgatggtctcaataaaatgctaacttgccagtgattaaaaaaaaaaaaaaagggcggccgcnctagnggg

SEQ ID NO: 2951 - DNA, 1241 bp, Homo sapiens
tcgacccacgcgtccggctatatgtatcccatacatcatgtgatataccttaaatatacacaatcaaatgtacttttagaagagcaatagaaaaatgtatactaaacaaacttaattcaaccaacccctgtactatgccatgccataactacctcatagtgtggttgttagatcagataatcttctatagaatttttagtactgtccyccatgcatattaagtacccaataaatgtamctattatgtttcaagcaccttgtttcctaatgtacttagtgtttttcccccattttgagcggatatagtaaggactatctatgtcttttgcaccattgtatgtacttgtctcgtaggttgcttgatttttcagtagcttccatatttatacatttaatcatttttcttatgctttctgttttcatttaattcactggtatggctgctgttatctcttattttgaatctggtttttgcttatgataatatgtgaattattttatgcggaagtaatgtcttttataatgtttctgaactaaatggcattatttttgttttctcctggacttttatgataaaagtatttagaattcttgtttcataaattattatccatatagtgaatacatatttcctccatcatacatcagttgtcttttagcatgagagctttttatagagtaggtgaggatgtaattatttataaaataatactatatatctggttagagactctttgatcctttgcattgtatgacagtgtgttgtacattggttaaacagcagttagggacttctcaaaagactattgtgttctgctctgcctaagatgtttcatttagcttttggggaattcccattgccttttgtcagaccaaagaaaaggattaatatcagtctttaattttaaaaataattaaatcattttaatcaattaaaatgattgwggctcccacctgtaatccctaccctttgggaagctgaggtaggaggattgcttgagcccaggagttcaagaccagcctgggcagcaaagtgagaccctgtgtctaacacacacacacacacacacacacacacacacacaaattaactgggcgtggtacctgtggtcctacgtgctcaggaggctgaggcaggaggatggcttgagcccaggaggtcaaggctgcagtgagccgttattgcactactgcactccagcctgggtgacagaatgagaccctgtcttcaaaaaaaaaaa

SEQ ID NO: 2952 - DNA, 1054 bp, Homo sapiens
gaattcggcacgagccccaccactgtccactgaccagaaacctggctgcagggccgaggactggtttggggactggagggctggcagcagcctgtcaccgtgcgaccgtgaccacctggcatgggcttcgtggcctgctctcaggaagtgggtcaagccctgggaaccctcatccatgagagctcgatcccgtatgaagggtgctgccgcccgtgccatctggcccgggggtgactttttgaactgtttattatatggtggatgatgatttcatctcacgtgctggacgctgttctgttcagtgtgctctttggactacattagtcccctgtggagcagcagggctggagatctctgcagtcccttccccgcccgccctgccagaaggccaaggaggcacgtggagggcctccttcctgcaattcttccctctccagagtcagggagggctgcccagccctggcctcacagccgtcccagatgttaggtgagccactgagctctgtgttgaccttgaggggcctggctgggggcccccaggctccatgccttcttgggagggtggccgccaacgcctttcctgtgttatggcaacagggagtgggcatctcatctgcctgtggtcagctctcagacggcagggagcggagctgacgttggctgtgcttggtcaccgctgccatgccgcagaggatgcgcctagctgggctggggccacacgactattatgttggccttgaacggggactgcagagccctcagtttgtctcccttgttcctctgtggctgaggtgggagggggagggtggggtaggtcccccagcaagaaagagggacaggagcaccccaggcaggaccaaggagtcgggaggcccctgccttctgtcctccatggtgagggcacagatgtctccccagagcccagcgctggcagaatggattctgctcctggctttgcttctgcggcttcggtggagacagttatggaataaaatgttccttgcacccaaaaaaaaaaaaaaaaaaaaaaaaaaaaaaaaaaaaaaaaaaaaaa

SEQ ID NO: 2953 - DNA, 1560 bp, Homo sapiens
acccacgcgtccgagatattcgtctaattccttataggcacttaggaacaaatactttaaaagatgcatttttagtaataatctgttagtctaagaaaagtggtaacaggaaaagccaataatttattacgctttgttttccatgtcatcttggttactagtttatattggttggcttctttcctccctgtagggaaaagtaatagaacctctgaaagattttcataaagatgaagtgagaattttgggcagagaacttggacttccagaagagttagtttccaggcatccatttccaggtaaaaattagaactgaattttgtttgattcatctttagaccttcatgttgaagaaaaatcaattcagacaattctgaaataatctgtcatctcagggaatatgtaacatgagagaaaggaaaggatggttagggaataattgaaatcttttgagtatctactgtatttacttcattttattaaatactcattttccattgtatctgcatttaagtgttacattatccttgggagtctggcatctgatgttgccatcagatgagaaaaccaagacataaagatattttaataatattgccacacagtcctagtagtagagctaggatttgttatattatttgtaccataccgcagtgcgttccatggaagatgtgaggatttaaatttagctctttaaaatccttgtcctatgtctgacttgtttgaatggatgaaccacttattctgtgcagagaattcttggcacaatgtaactaattcctgaacaaataatacttcatttgctgtcatatagaaaaaaattagaggtgatacttgtttaaagttaggactgcaagtcttaacctgtttttgttactagtycttgagaggttgggcaagtctgtacatcaggttctagctcactgtaatagtgattaggggatgatttgggagaatgacstaattgaattgaaaagcataataatagccaacatttcttaagtactttctatgtgctaggcactctgctaaatacattttattgtcttatttaatcttcacagtggaaactactattatcctgttttacagatgaagaaacttagggacagcgactaatttgccaaaagttatgcagattgaaaggagtggagccagaatgatatccccaataatttttatctcagagtttatactcttaatgatcatattggctccataaacagctttacacatgtataacctatgtggtgattagcacttgttctcaaatcaagtaatcagattgagatctttagtccctaacctgcatgccggcgaagaatggtctgtggaccggtgtggtggctcatgcctgtaaccctgagtctactaaaaatagaaaaattagccaggtgtggtggcatgtgcctgtaattctagctactcgggaggctgaggcaggagaatcgcttgaacccgggaggcagaggttgcagtgagacaagattacaccacagcactccaacctgggcaacagagcatgactccatcttaaaaaaaaaaaaaaagggcggccgc

SEQ ID NO: 2954 - DNA, 1390 bp, Homo sapiens
tcgacccacgcgtccgaaatgctatctggacatcaatgcccttcaggagctgtatcagaagaagctaactgaagagtccttgacttctgatgctgcaaatgataatcacattgtggctgaaggggtgtctgaggagtctctgaacagactgaaaggtgctgttagctttggatatggcctttttcacctttgcatatccatggtgcccccaaacctgctcaaaatcatcaacctgctgggttttcctggagaccgcctacaggggctttcttcactgatgtatgcaagcgaaagtaaggacatgaaggcccctttagctacattagctctgctctggtatcatactgtagtccgcccgttttttgccttggatggcagtgataacaaggcaggcctggatgaagctaaggaaattctccttaaaaaagaagctgcttatccaaattcttccctctttatgtttttcaagggacggatacaacgactagagtgtcaaatcaacagtgccttgacatctttccacactgctttggaacttgcagtagaccagagagaaattcaacatgtctgtctgtatgaaattggttggtgcagcatgatagagctcaatttcaaggatgcatttgattcctttgagaggctaaaaaatgagtccaggtggtcccagtgctattatgcctacttgactgcagtttgtcagggagccactggtgatgtggatggggcacagattgtctttaaagaagttcagaaactcttcaaaaggaaaaacaatcagattgaacagttctcggtgaaaaaggcagagcgatttcggaagcaaaccccaaccaaagcgctctgtgtgttggcgtctattgaagtgttgtacttgtrraaagctcttccaaactgttccttccccaacctgcagaggatgagtcaagcttgccatgaagtggatgactcatctgttgttggattaaagtatttgcttcttggtgccatacacaaatgtctaggaaactcagaagatgctgttcagtacttccagcgagctgttaaagatgaattgtgtcgtcagaataatttatatgttcagccgtatgcctgttatgaacttggctgtcttctattagacaaaccagagactgtaggaagaggcagagctctacttcttcaagcaaaggaggatttctctggctacgactttgaaaacagattgcatgtccgcatccatgctgctctggcctctctgagggaattggttcctcagtgacagacccggaacacccgctccgtccctccccacccagggtccgcactttaaaataaaagcagaggacaaaaaaaaaaaaaaaaaaaaaaaaaaaaaaaaaaaaaaaaaaaaaaaaaaaaaaagggcggccgc

SEQ ID NO: 2955 - DNA, 1472 bp, Homo sapiens
  misc_feature (55)..(55): n equals a,t,g, or c
  misc_feature (961)..(961): n equals a,t,g, or c
  misc_feature (973)..(973): n equals a,t,g, or c
  misc_feature (1464)..(1464): n equals a,t,g, or c
ggtcgacccacgcgtccgcctaaatctcccaaagtgctgggattacaggcgtgancactgcacccagtctggtttgactttcagtgacacttttacttcttttaagtgcataaagtaaaaaatactaagataaaggacgcaaattaattcctaattaacatatttatagtttggaaaaagtgctagaggtgcttgccagttcaatttaattccatgcccagaatgtggtttctgtttattgaaatgttcttagttttggtcatctgttactacttgctgttgtcttcacggggccctgactggccttggcataactaggctgctaggggaatagttcttagagagtcattttatgtattggatttwattctgatttgttttctctctgaaagctggttgttatttgtttttttkwkkkttttttcgatcttaggtggtggttgacacagcacagattgagaataaagaagcctatgccccccagatcagtttagaaggctctagaatcgtggttcaagtcccatccacatggtaacgtgcctcttactttcaccggagcctaagctctgactgacgtttgcacatctttgaaatgatggccttgttttgaacaatgcccatgctagctgacgcaacaagtcttgctgcatgtgcaggtttatgggcagcagtggtatgttagtggcatgtgtcatgattattggtctgtgatgaggaagccaagaagtctgaaaaatggtctcattgaccataatgtaactaaaatgttatatactcttggatcataatgagcagtattatctttgttactgagtctacagcatttaaacatagtatatcattttctckaagtcacccagtgtkcactaaagcccastaaagaacatagaattccttctcctctgttccaactacaatcctgatgatctygagctcatgttgtgacacacccagtgtcttnacaaatcttggnacagtcatttttagatattatatttgtamcacttataatagataaaagattattcttaatttatttttttttaaaaaaagctcctacaaatcagaagaaaatgggcaagggacatgaacagctaagtcagaaaagaagacatatgatcaacaaatagattwagraaatgtaatggccmagtgcggtgactcacacctgtaatcctagcactttgggaggccaaggtgggcagatcgcctgaggtcagaggtttgagaccagcctgcccaatgtggtgaaaccccatctctactaaagatacaaaaactatccaggcatggtggtgggtgcctgtaattccagctaatcaggaagctgaggcacaagaattgcttgaacccaggaggcggaggttgcagagagctgagattgcactattgcactccagcctgggcaatagagcaaaactatctcaaaaaaaaaaaaaaaaaaaaaaagggcggccgctcttngagaccca

SEQ ID NO: 2956 - DNA, 893 bp, Homo sapiens
  misc_feature (859)..(859): n equals a,t,g, or c
  misc_feature (875)..(875): n equals a,t,g, or c
  misc_feature (884)..(884): n equals a,t,g, or c
gaatagaagcaagggacataatgaaagagtcaaaaagggaaaagttttaaaacaatacttggcttactctgagcatagtttcccctttccttaattaacgcttgctcatatattactcagaaagtccaagtgtaggcttcagaggagaggagccatagatagctttcatcagattcttgatgaaacccacagtacaaatgttaagaaacacagctctgtggtatcatctgttgactgatctgctgctaatctatttaataggaagagttgtttctatatccttctacttttaccattaaagaaaaagtaatcaactagtcactgttcattttattttcaaatttatttttgcttaaatcattgcagaatcagaaaaaaatttttattatattgtttctgaaatgttaacatttaggtgaaatgcttaatcaggttgagtatcacttacctgaaatgcttgggaccagaaatatttgggattttttcagattttggaatatttgcatttatatgcttagtatttgaacatcccaaatctgaaaatccaaaatgttccagtgagcatttccctttggtgtaacatgaacactgaaaaagtttcagtttttgtagcatttctgattttttgtgttttacgtatgtatatgtatatctgtatcttgtttttttgtttggttgtttgagacagaatcttgctctgtcacccaggctggagtgcagtgagctgagatcaggtcactgcactctagcctgggcgacagagcaagatgcaagactctgtccccctccaaaaaaaaaaaaaaaaaaaaaaaaaaaaaaaaaaaaaaaaaaaaaaaaaaaaaaaaaaaagggcggccgntttaaaggatccaagnttacgtacncgtgcatgc

SEQ ID NO: 2957 - DNA, 1066 bp, Homo sapiens
cgcgtccgattttttgtattttttctagggacggttttcgccatgttgggcaggttggtcttgaactcttgaactcctgacctcaggtgatccacccgtctcagcctcccaaagtgctgggattacagcatgagccactggccgacttttgcttcctttacagattactttgcagattgacatccaggctatacccttgtttatgtgagcgaggctgtgttgtaggcactggcactatacttacacagaagttggcaacttctcattgccttgcacaaatgtggataatagtaataacaaactaatgttgaatgattagaattttaatcagttctttaaaagtagccattattttggcatgttaggtagggagagattcaaattatttatgttatcttcccaacttgagaatggcattattagatcaagccattagacttatagattgcggaagatttagatgtacttcttaattatgaaaattacatttaccttactcaaataaccccatatatacctaaaagttttaataaactaaagcatgaccacatgactcaatcagctgtccgtaataacctgtggtataggtaggacttagttgggcaaagggtgagatgtggccatcttcacgggctcataagagataaccaaggtcccttcaggtcggccagcctcatcatgcctcagctctttctaatcctgcttattagtaaggtggatgtttattcatttatttatttggttagttaaataacaggccgcaatttactgtgttacttaaattttacttaagtaaaatttaagaagaagaagaagatgatgactgtaaaaacaaaggtgtgaatatatttagctatacatgagataggatatcaaatacataaatagttcaatttgcagttgcacagtgccatttcacccaggttaaacaataggaagactcgatgcatacgtgtcatctgtaaatgctctcatgtgaaagaaattgtgaagtaaaataaagtatcttgagtagaaatttttctacattttctcaaaataaaaaaaaaaaaaaaaaaaaaaaaaa

SEQ ID NO: 2958 - DNA, 1436 bp, Homo sapiens
  misc_feature (449)..(449): n equals a,t,g, or c
tcgacccacgcgtccggcctcagccgaagccctcagccctgcggtccggggcaggagacaagcccagaggggctgggtgcagcagcctggcactgccatcggggcctccacctgacgccctcacaccagcccatgtctttcagctgtgcatgcgcaggctctgcctctgtcttcttcctgttctgtgtggcccagccccttcctggaaccaggcagccctggcaggagtgagggccagctgcagggaaagtgaagggggcaacacctgccaggctgtgggtctcacgaggctcgggggagttataagaggccccctctctcagggaactcctcccaggcttggggaggaggcatcctggacccagccacgccccacagatctgaccgaagcaggggttcttggtcttgcttggaacccagattcagccccctttgggaatctaatcaanggtgtggaccctttcccagagaaaatggtgtgttcactcctgagggtccatgggcccttgaagctgctcatggctcccctgctgcaggattcccctgggtgcccgtcaaactacagcttccctggggggcctccaccccatacttacccaccagcttcttaagagttcgagctcggacccttatagtagtaaacaggctccccagagcctggtggcctttctggggccacccggcagcctgcatgggacacccatggccttgtctcctccggccccagctctcttttccagctcagccaaggctgatggcggaaaagagcagctgacgtacgagtctggggaagacgaggaggatgaggaggaggaggaagaggaggaggaggacttcaagccatccgacggcagtgaaaacgaaatggagacagagattctggactacgtgtgacagggcccaaggctgggcctccctgacccggccagactggtgtctggcctaatgagggagccggggctccccattgccacccacagtgcccggaatggccctaggaggccctctgaggagagctagagtcccagcaaagggtgcagctgaccctagcactggctgtgacatgctgcttggtgctgcctctggtcctgaggggttagggacatccccaaagggtataccctggctctgccacccatgaaccagcccagcatccagccagtgagtgggcacccaatgcctctcaggatgagaccagtaaatgccggaggtggagctgggcagctgtggagccccaggccacaggccagtctcgcttggctctcatgactgtggtggtggagatagcgtggggagcctcgcccatggtctcacgtggcaagaagtgcctttagctctggatcccaaccgtttggcacagctttggccacagccaggcccctctggaattgtccttattaaaccagtttcccgagaaaaaaaaaaaaaaaaagggc

SEQ ID NO: 2959 - DNA, 684 bp, Homo sapiens
ggtgctcggtcaagatcatgataaaccgctggaaagggagaagaagttaaggtagtactacagacagaatcttatactttggaaaaaaattcatgacaaagaaaccccaaagtattgcctgttccaccctgtctttgtggtgtgtgtgcctagcttccattattcatgaagtcaacctagaagggcagactggtaataacatgagttggtacattcttcctggcaatacataaagacctttaatgtcttaaattacttatcctagtaatattacttcctggaatctattctaacgartaatcagaaattttaacaggaatctatgcattaaaatgttcatggaaggaaaatgatcagcaatgaggaataattaaacgagacatatataaaaaaagcaacccacaattttttttcaagcatggagaaatgctcatgcgagaatactaagtaaacagcagagaaactcagacatacatggttgcctctgagtagtgaacttttatttccttcctaaatttttgtatttttaatctcttctataaatgaatgtgtattccttttacaatgaaaaataacatttttaaaaactaaaactaaagaaatgtattgtttccttttatgtataaatgtcccaagccaagatacctgaaatataacgaggaaaagattcttttgttcactctg

SEQ ID NO: 2960 - DNA, 1851 bp, Homo sapiens
  misc_feature (1171)..(1171): n equals a,t,g, or c
tcgacccacgcgtccgcatttgtccatatctataagactttacttctgggttctctattctgttctgtttatttatatgtctgtctttaggacagtactacacagttttgattcccctgttgtaggggaatcttgttttattgtgcttcactttattacgctttgcagataatgcattgtttacaaatggaaggtttgtggtaaccttgcatcaagcaagtctattggcaccatttttccaatagcatatgctcactttgtgttcttatgccataatttggtaattcttgcaatgttttcagtttttttcctcctcctcctccttttccttcsttttatcctcctcctcctccttcctccttcctcctccgtcctcctcctcttcctcttcctcttcctcctcctcttctccttctcctccttcttttccttcttcttctttctgggacagggtctcattcttctgcccaggttggagtataccggcacgatcatagcccgctgtagactcaaactcctgacctcaagcaatcctcccttcttggcctcccaaagtgctgggattagaggcatgagccactgcacctggccagtttttcattattcttatatatgttatgggaatgtgactagtgatctttgaagatactattgtaactgtttwgggggcaccataagccatacccatgtaagacttgaactgtgtattccagtgaaaggaagagctgcatgtctgtcactttaaattaaaagctagaaatgattaagtgctgtgaggaaagcatgtcaaaagctgggtgagttaggtcaaaagttaggcctcttgtaccaagtagttagccagcttgtgagtgtgaaggaaaatttcttgsaggaaactaaatgtgctccttcagtgaacagtcgaatgttaagaaagcgacacagggttattgctaatatggagaaagtttagtggtctgggtagatcaaaccagccacaattttcccttgagccaaagcctaatccagagcaaggccctaaatctcttcaattctttgaaggctgagaggaatgaggaaactgcagamsaaatgtktsaagctagcakargttgtttcatgatatttgaagaaagaagctaccattataatatgaaagtgcaaggtgaagcagcaagtgctgacgtanaagctgcagcaagttatccagaagctctagctaagatcattgagaaaggtggctacactaaacaacagattttcaatgtaaaccaaacagctttctaatggtgaagataccatccaggatgaggagtcaatgcctagcttcaaatcttcaaaggacaggatggctttcttgttaagggccactgctcatttaccattctgaaaatcctaggttccttaagaattatgctaattttactctgcttgtagtgtagaagtggaagagcaaagcttggatgacagcacatctgtttactgcatggcttactgaatagtttaaacccactgttgagccctactgctcagaaaaaaaagactcctttaaaaatattactgctctggctcacgcctgtaatcccagcactttgggargccgaggcgggtggatcatgaggtcaggagatcgagaccatcctggctaacaaggtgaaaccccatctctactaaaaatacaaaaaattagccgggcgcggtggcgggcgcctgtagtcccagctactcgggaggctgaggcaggagaatggcgtgaacctgggaagcggagctttcagtgagccgagattgcgccactgcggtccgcagtccggcctgggcgacagagcaagactccgtctcaaaaaaaaaaaaaaaaaaagggcggcc

SEQ ID NO: 2961 - DNA, 1693 bp, Homo sapiens
  misc_feature (997)..(997): n equals a,t,g, or c
ctcgtgccgcagcagtgttcaatttgctcaccattggtagtgtttgctaaaattgtatttttttaagctaagtaacatgtactgggttgagaacctttttcccccctctccctctcagaaaattgctttataaaattgctttataatttgattttcttactgaaacgcatggtggtgtctaggtggggaactgactgataacccttggcagcaatcaaagtgccagtggctcctcgatgtttacatttttttctattttgttcagtcttttgttttaaatgattctaaagagattaaagaaaacagagttttaaatgtcctrtttacatgttaaaggatttggggaaattgggtatgtatgtgaatgggtgtacatgtaggaacctgtagttcagcaaagctgcgctgggcacagcatgcttgtacttgattgacaaaatcgtgtttgccagtccactttctatttttcctttaagtgatgctgatcactcaaataatgcttttaagctattgtttgtttttatttgacatgttaagccgcagcactttcttcttcatctttccatttactgatatttgggggaacaggctatcaaaggttccggcttgaagggaactgtcactaccccctctaggaagttattttatgtagcatgtttgcatatacgcattgtgtggcatgtgcatagaggcttgttttacacctatctgctcattttgttgtgttagcttttctggtttatktcatagtttgttcttgctatttattaagaacagaatatcaaaagattatgaatagcctcagctctagaatgcttaccactgttaaaacaacaaaaagactaaacctctaatttcatgcaaatctttgttagcttattctaagaaatttattaagtaaaacaaagaaaaaacagaagtgggagatagttattttgtgcgtaattttctttaaatcattttgaatgatgtgaaggcattcagtttgctgtatttnttttaatcacttcatacaaggaaaacttcgacatttacatttctasatgtagtaacagtctactttgatatatgagtatttaaactaaggcattaagagatattagatatttcttaatgttttcatagtgctcaataggtgtagtagcaatgatattacctctgaaaccaaatactcttttatccttgattccactatgggaccttataactagtccatgaaaccaagctcagaaaagctttaactcttatatttgtgtatatgtatgctgcttctgaaaatataatttttctaagttgttgtaatgactttaatttgtaatcagctaaggcttaagatttcatttgtttctaagtttctgtttttcatcccttcttttttcttttatatttagttcagacctagagccagtagaagctctcacagtgagttcaatttgttagtgaaacattgtactgcatcaccagtttttcttaccttctgttgacagctgaatatttctgttactcagtacttgcaaaaacagtaactaaaatgcactatgctgagtggaaagcaccgtcataacaattgattgccatagcaagttccaaagtgaatttcagccttgcttcacatttgtatcaataaatatgcacattttttaaaactttctaacaaaaaaaaaaaaaaaaaaaaaaaaaaaaaagggcggcc

SEQ ID NO: 2962 - DNA, 1298 bp, Homo sapiens
  misc_feature (319)..(319): n equals a,t,g, or c
gcctcatccctttttttcagtatgtgcaacgtatagagaaacagtttcttttgtatgcctactggataggcttaggaattttgtcttctgttgggcttggaacagggctgcacacctttctgctttatctggtaagaataatttattttaataagcaaaaatgatatttcctatctttttattggtgcttttatgtcagaagtaaaaattctaagatttgttttaattacctttgtgttttgtaagcattctgatcctccaatcagtgctttaagtttgacttagagttctgtttkgttttcctttagggttagtattnaaaaagcaaagagaaaaccccagttaagcaaataaggttgtttatttaaattagtttagcgtggaaggtttttcttttctttctagatttaattgcttaagcaattgttattttaataaatgaagtccatttaaatatgcaaaattccatgtgagaaatgtcttcccttacatcctctaacatcatttacatacttggatatttattttggtattcttgttgaatgtaattgatggagtattaacatgtagaactaaatgctttcttgagtcctttgaaccaaagtataaaaagtgccccttctgggctgggcgtggtggctcacgcctgtaatcccagcactttgggaggccaaggcgggcagatcatgaggtctggagatcgagaccatcctggctaacatggtgaaaccctgtctctactaaaaatacaaaaaattagccggacgtggtggcgggtgcctgtagtcccacatactcaggatgctgaggcaggagaatggcctgaacccgggaggcggagcttccagtgagtggagatggcgccactgcactccarcctgggcgacagagcaagactcygtctcaaaaaaaaaaaaaaaaaaaaagtgccccttctgaaaaatattcttttactagtggaaataagagagaatggccaggcgcagtggctcacacctgtaatcccagcactttgggaggccgaggcargcggatcacaaggycaggagatcgagaccatcctggctaacatggkgaaaccccgtctctactaaatatacaaaaaaaatcagccgarcttagtggcaggcgcctgtagtcccagctactcgggaggctgaggcaggagagtgatgtgaacctgggaggtggagcttgcagtgagccgagatcacgccactgcactccaacctgggcgacagagcaagactccgtctcaaaaaaaaaaaaaaaaaaaaaaaaaaaaaaaaaagggcggc

SEQ ID NO: 2963 - DNA, 504 bp, Homo sapiens
ggcacgagctcgtgccgaattcggcacgagatgaactggaggaagttactacagtggaagggttcttaataacaaggtctacctagcatgaagtatttaacattctcccatcccttaaaaaatatacatttttataaaatgaaaaccataataaatgttttgaatattaaaaaaaataataacctacagaggaaaattaatggagacagctatttgccttgtactttttccacaattgttgctgctagttgtacacatctctagttcagctcttgcccacgggacactcatcaattaggttttatttttatttctttcctctacccccagaaacaagcctgttaattttttttccttctcctctggcgactgtgtgatgaatcctttcttgcgtgatcaggttgcggatagacttgtaagggtgtttgctgcatacagtgtaagcattgtgaccgccaataaacttcaatggtttctactgaaaaaaaaaaaaaaaaaaaaaaa

SEQ ID NO: 2964 - DNA, 761 bp, Homo sapiens
ctgcaggaattcggcacgagtcccactacatgcagtggcccagggcagaggggctgatacatggcctttttcagggggtgctcctcgcggggtggacttgggagtgtgcagtgggacagggggctgcaggggtcctgccaccaccgagcaccaacttggccccctggggtcctgcctcatgaatgaggccttccccagggctggcctgactgtgctgggggctgggttaacgttttctcagggaaccacaatgcacgaaagaggaactggggttgctaaccaggatgctgggaacaaaggcctcttgaagcccagccacagcccagctgagcatgaggcccagcccatagacggcacaggccacctggcccattccctgggcattccctgctttgcattgctgcttctcttcaccccgtggaggctatgtcaccctaactatcctggaatgtgttgagagggattctgaatgatcaatatagcttggtgagacagtgccgagatagatagccatgtctgccttgggcacgggagagggaagtggcagcatgcatgctgtttcttggccttttctgttagaatacttggtgctttccaacacactttcacatgtgttgtaacttgtttgatccacccccttccctgaaaatcctgggaggttttattgctgccatttaacacagagggcaatagaggttctgaaaggtctgtgtctcgtcaaaacaagtaaacggtggaactacgactaaaaaaaaaaaaaa

SEQ ID NO: 2965 - DNA, 1924 bp, Homo sapiens
ggcacgaggcaaacaaaaatctccagctgcccacgttgctttggtcatgacccttccttcagatcacttctgcctttatttttgctgtttaggggatgtgttatcacagaaacttggaatgcagagaaatgttatcacagaaacttggaatgcagaaaaatttttgctttttaggggaggtgttatcacagaaacttggaatacaaagacctccccccaccgcagccctgccccaccccacctaccccctgctggatttagcactgcacttccattttagcagtgatttccttcctttttgccctcgcctgccttccagtaacacataatttccttctatttccagagctgtcgatgatgaaatcgaggccaatcttgaagagttcgacatcagcgaggatgacattgatgatggattcaggagactgtttgcccagttggcaggagaggatgcggagatctctgcctttgagctgcagaccaccctgagaagggttctagcaaagcgccaagatatccagtcagatggcttcagcatcgagacatgcaaaattatggttgacatgctagattcggacgggagtggcaagctggggctgaaggagttctacattctctggacgaagattcaaaaataccaaaaaatttaccgagaaatcgacgttgacaggtctggtaccatgaattcctacgaaatgcggaaggcattagaagaagcaggtttcaagatgccctgtcaactccaccaagtcatcgttgctcggtttgcagatgaccagctcatcatcgattttgataattttgttcggtgtttggttcggctggaaacgctattcaagatatttaagcagctggatcccgagaatactggaacaatagagctcgaccttatctcttggctctgtttctcagtactttgaagttataactaatctgcctgaagacttctcatgatggaaaatcagccaaggactaagcttccatagaaatacactttgtatctggacctcaaaattatgggaacatttacttaaacggatgatcatagctgaaaataatgatactgtcaatttgagatagcagaagtttcacacatcaaagtaaaagatttgcatatcattatactaaatgcaaatgagtcgcttaacccttgacaaggtcaaagaaagctttaaatctgtaaatagtatacactttttacttttacacactttcctgttcatagcaatattaaatcaggaaaaaaaaatgcagggaggtatttaacagctgagcaaaaacattgagtcactctcaaaggacacgaggcccttggcagggaatatttaaagcaacttcaagtttaaaatgcagctgttgattctaccaaacaacagtccaagattaccatttcccatgagccaactgggaaacatggtatatcatgaagtaatcttgtcaaggcatctggagagtccaggagagaagactcacctctgtcgcttgggttaaacaagagacaggttttgtagaatattgattggtaatagtaaatcgttctccttacaatcaagttcttgaccctattcggccttatacatctggtcttacaaagaccaaagggatcctgcgcttgatcaactgaaccagtatgccaaaaccaggcatccaatttgtaaaccaattatgataaaggacaaaataagctgtttgccacctcaaaactttatgaacttcaccaccactagtgtctgtccatggagttagaggggacatcacttagaagttcttatagaaaggacacaagtttgtttcctggctttaccttgggaaaatgctagcaacattatagaaattttgccttgttgccttatcttcttccaaatgtactgttaaataaaaataaagggttaccccatgcaatcacaaaaaaaaaaaaaaaaaa

SEQ ID NO: 2966 - DNA, 1600 bp, Homo sapiens
  misc_feature (464)..(464): n equals a,t,g, or c
gggtggacttctcacatctcaggctacatttcccatgctcctgggcgtctttctaacagggttgttcctcccaatcttgatggcaatctttttgctgaagtgcaactcattttaaacttcaattaaattgcgtgaaactgactgttggccctgtggattatcggcacccttgtgttagagcccctgatgagaaatgtgtatttttattgcatatttaggccatttgaaaaatggttattacttacccatataatacaaagaataggtttcttctaagaaattcaaagcacactgcaaattaatcttaattgtttggcatttattcattccctgagtcattcatctattcggtaatgatttattgaatacctcctgtgccctggacactctgttaagttaaaaatagaaaagtmcatctctgccctcaacctgatagttgagatgaaatgatgtaatcgtgtatncattgagctagagtgcyctgtggtatgttctttggtatgcagtgtcagtaattattaataacagtaatgactaacatgtattgagtgcttactttatgccagatgttatgacagacccatttacttataactcagttgatccttcagacaatcaaccacatgagctgtcattacttgattatccccattttacacatggggaaacttaggcttagaaaggtatttcacccatcgtaactcagatgaaaagtggtagagttgggattcaaactcagacctttctggttatgaaacctctgttccagtccccaaattgctttgcttgaggccaaacatagagaattatttatagggtattctgttgcatttgtttttgtattttttctatgataataggtccagctgttaacaggtttttcattcagtataatattgccctgtaaaggaggttggctctgatgaatgccaaaaaacgtttctgttcaatgtataactcccactgtaggaggtaggtatagatgatactcttatggatggcccgtttgggtgtatgaatccataagctcatgacctcacatcagatggtttgaaataaaggtcaagcaataacaattcatatcttttcagtaaattttgaaattaatatggcagcagctgtttataagggactctgattttatttactaactaggatttacaagagaaataaaacttgattctcagccttcaaggaacttgtaatacagaaagttacttctagtgaaactgccaaactcagagctgaatgaaatggaaagtaagaaaagtgtatagaaagttaccagatggaggaccaggcatagtggctcaggccagtaatcccaacactttgggaggctgaggtgggtggatcacctgaggtcagtagttcgagaccagcctggccaacatggtgaaactccaactctactaaaaatacaaaaaccagccaggtgtggtggtgggcacctataatcccagctacttgggaagctgaggcaggagaaccgcgtggacccgggaggcagagattgcagtgagccgagatcgccccagtgcactccagcctgggcgacagagtgagactctgtctcaaaaaaaaaaaaaaaaaactcgag

SEQ ID NO: 2967 - DNA, 759 bp, Homo sapiens
ggcacgaggaggttgccccgactcctaatgccacatcaggctggctctctcccacagttagatctaatgggagagaaggtcaggttccaccaggggaggttctgagaccgaacttagtaagaagctattgtaaaggaaacagtaacaggagaaaactgtatggcaaatacatattttctcctgtatcaaagaaatttaaatcattttaagtcactctggacctgtttcttcatctgcaaaacagggaagttatagattagatgatccttatagttccctatatccttaaggttgtgtggttctatttttgaatttaaaagcagcttgcttttacagctcaaccccaggttctgagaggttcaaatagtatgttctggcaaaagggattcaggtaggtgaaattgctaaataaaagcatgctgatggtttgagtagttctccctgaccttgtgtgtgctttataagatcctttagtagtctctactctcgatgtacactggtggggacctcctcccagccagagagtggctccttgccagaccctcacactcatctgtgtcctatgttctggactcaggattgtgtgccagcttcagaggatgctctccatagccgtagaggtggacaggacccccacctgcagctccaataaaattgccgagacgatgtttgggtttgtgctggacattcctgagaggagccagaggtgagtcttgattttgttggggagagcagttatttaaaaaaaaaaaaaaaaaa

SEQ ID NO: 2968 - DNA, 776 bp, Homo sapiens
ggcacgagagaccattgagcctggcatatagtactcaataaatacttgttgaataaataaatgaatagcgactgtgatagggtaataataaaatagtaataatcactacctgtgttaagggcttactcttatgctagacactgttccaaatcctttccatgtttatgtttctccttttagtaggattgtgtttatttccattaaacatcaccaagaaaaacaaaaagaaatcctgtattaacatttgctgcatttctaaatgacattctggccaaaaactatagtttatcttgacgtagatgatttttgcaatcaagacaagttatcactcaaagaccactccaatttattgtccaatcctctggtaacaaatgtggtcagtaggagttcttatacctggcagatagacaagggcaatggttttcaaacttttatctcaagaactcattatacccataaaaactattgaagatcctgggctgggcgtggtggctcactcctgtaatcccagcactttgggaggctgaggcaggcggatcacttgaggtcaggagttcgagaccagcctggccaacatggtggaacctcgtctctactaaaaataaaaaattagttgggcatggtggcacatgcctgtaattccagctactcgggaggctgaggcaggagaatcgcttgaacctgggaggcagaggttgcaggagccgagatcgtgccactgcactccagcctgggcaacagagcaagaccctgtctcaaaaaaaaaaaaaaaaaaa

SEQ ID NO: 2969 - DNA, 1573 bp, Homo sapiens
ggcacgagagacaggggatccccctgatactttaggatggaagtaatagtcatggggatttattctgcaaggggaatgagatggtaagcctttggggttgaattatctaaaaacaagggagagggagtgtgctgctgtctctagaaagatgaaatgtgtgcttctcctgtttgttaaagctcttttgggggtcccagtgaaagcaagcataggtgaacgatcaggagcacatcagtgaggaacgcatgttcagaagcccccatgatgctccttttcttcctcttaagcctggctctgacagtggtacaacagcggtggtggccctgatacgagggaagcagttgattgtagccaacgcaggagactctcgctgtgtggtatctgaggctggcaaagctttagacatgtcctatgatcacaaaccagaggatgaagtagaactagcacgcatcaagaatgctggtggcaaggtcaccatggatgggcgagtcaacgggggcctcaacctctccagagccattggaatgtgatgagcagccaggaagttgtagatttcattcaatcaaagatcagccagcgtgatgaaaatggggagcttcggttattgtcatccattgtggaagaggtgagtaccagggtggagaagagagggtgtctggtctgcacagccagggttcactcttttaatctgagctaagtcggcaatctgggagcattatcagtaattgctgacagacgctaaaccccgactccaaagttccaccttctgtcatttccctgacttagccttatgccttatggactagcaggtgggccgttgtgtgatacctcttgcccattcctctcctaccaccctgactcagcaagccagccctcttgtgggactgtagattcctggcaaggtgttcaaaccctgtggctgagctacccccatccctttcttagctgctggatcagtgcctggcaccagacacttctggggatggtacagggtgtgacaacatgacctgcatcatcatttgcttcaagccccgaaacacagcagagctccagccagagagtggcaagcgaaaactagaggaggtgctctctactgagggggctgaagaaaatggcaacagcgacaagaagaagaaggccaagcgagactagcagtcatccagacccctgcccacctagactgttttctgagccctccggacctgagactgagttttgtctttttcctctagccttagcagtgggtatgaggtgtgcagggggagctgggtggcttcactccgcccattccaaagagggctctccctccacactgcagccgggagcctctgctgtcctccccagccgcctctgctcctcgggctcatcaccggttctgtgcctgtgctctgttgtgttggagggaaggactggcggttctggtttttactctgtgaactttatttaaggacattcttttttattggcggctccatggccctcggccgcttgcacccgctctctgttgtacactttcaatcaacactttttcagactaaaggccaaaacctaatcgtaaaaaaaaaaaaaaaaa

SEQ ID NO: 2970 - DNA, 1440 bp, Homo sapiens
tggacaagagccgggaacagacgcctccttacacaggacatcccaggactaatcaatgtggggaaaggtgctcacgtcattgcattagcatcacaacttcaagaaaatgctcgttaaaaccagagtgacttgcaccagcacccgccccagaacggccgaatgcccatcagtgctggcaagtctgaagcagtctggcctcacaccctgcgtgtaggagtatgcagctctttggcaatctcttctgttttgctttgtttgtttttaaccatcgaactgcagaagataatattttctgaggctcagcctgtacataccctctgacccagcagcctgcagccctcgttctacccaggagagctgagtgcatctgtccacaccgacagacgtgtccatagccactttggtcataatctcccaaaacaagaatcagcccagtgtccatctacaggggcatggatcagtggaggcctaatcgtacagggccccaaacagctgtgaaaacagacatagtactgctacctggaagaagcttacattttgttgagtgaaagaagccagacactaaaaagggcatactggccgggcacagtggctcacgcctgtaatcccagcactttgggaggccgaggcgggcggatcacgargtcaggagattgagaccatcctggctaacatggtgaaacaccgtctctactaaaaatacaaaaaattagccgggtgtggtggtgggcgcctgtagtcccagctactcgggaggctgaggcgggagaatggcatgaacccaggaggcggagcttgcagtgagccgagaccgcgccacggcactccagcctgggcgacagagcgggactccgtctaaaaaaaaaaaggagggcctactgtgtgcctccagttctgtgagggtcagaagctgatccacagtaatggctgccaacagtgcttaccttgagagagggaatagcaggaaagccacacgacgagccttctaggatactggggatattctctctatagatctggatgtgtatatgatgtgtacattcaccaaggtgtacacatgagatatgtacacttctctgtattccattacaccttggtttttgaaaagacagaaacagcatgctcagcttattaagaacctgaatattttcagacaaaaagtatgtctagtgttagtccacttttttttttttttagttttagactcacagagccytcttagggtcatatttagttgtatatcatctgacaaaagagggaatggctcacccagctgctacagtcagtcttgtagcctttgtaagatawwgaawgataaatcatacaataaattaaaactttcggctgggcacagtggctcacgcccataatccccagcactttgggaggccgaggcggaggatcacttgagcccaggagttcagatgagcctggccaaca

SEQ ID NO: 2971 - DNA, 1544 bp, Homo sapiens
  misc_feature (467)..(467): n equals a,t,g, or c
  misc_feature (471)..(471): n equals a,t,g, or c
ggcacgagcttgaataatattttgagtaagaaaaacagatgcatctgacagttctttttccacccactatctggggatgtctttttctggggctagtccatcttgtcctggataactaccctatcttgagaacccagtcttagtttcatgaaacatctttaatgaaaacagccttttgggatggtgctgctgcaaactgtggtctggctctcctcgcatgtgctctggctgccgcagaacagagctcaggccgctagggggcacctccacgtgccgcttttagcagtaccagccacctcaaagctttgccacagactgaatagctccttccgggggcctggatggcacccaggggatctgccgttgcttttttaatttatttttttacatttagctcattaatatctgttagatatttttatgtctgcattgaaatatgtaactttatttttcccccaaaggataantgtnccaacattatcagttagcttgtcttttccccaccatcttaaaatacgactcttatttttaaaattgcattttataaacatgtatgtttcagtaatttatattctgccccactgatctatattcccatcttagaattatacttttattttatttttaaaatttatttagagacaaggtcttggtatgtcactcaggctggaatgcagtggtgcaatgataattcactgcaaccttgaattcctgggctcaagcaatcctcccacctcagccttccaagtagctgggactacaggtgtgtgccactatgcctggctaatttttttatttttatttttttgtggagacgatgttttgctatgttgcccaggctggtctcaaactcctgggctcgagggatcttcctgtcttggctgcccaaagtgttgggattataggcatgagccacctcacccagccttagtattatactattttagttaacaaagctttacaatgaattttgatacctagaaagactgcacccaggtgaaataaacagccttgtttctcacacaaagcctgtttggtggtctcttcacatggacacgtgagacagatttcgctagggaagcaaataaccatggaggtgggcaagaaatatccatgattgtagagctttcaatcagccttttattcttgtaacaaatgaaaaacaaaggattatcagacatctgcggaaaacctctaacatagaagaaggagataaaatgaacaaacaataaaaagcaacttaaaaatggacaccatataaagaaaggaaaacagtttaaaaaaaaaaaaaacccaaaaccctattcttaagctacagagaaagcctggccaacatggtgaaaccctatctctactaaaaatacgaagtattttagccaggcatggtggcacatacctgtagtcccagctgctcaggaggctgaggcaggagaatcacctgcacccgggaggctgaggctgcagtgttctgagatcacaccacagcactccagcctgggtgacagagtgagaccttgtctcaaaaaaaaaaaaaaaaaaaaaaa

SEQ ID NO: 2972 - DNA, 1335 bp, Homo sapiens
tcgacccacgcgtccgaaagaaagaaagaaagaaatcatagacaacgggaataaaaactgcaagatacctaggaatgaatccaacaaatgcactttcttcacagatcaaagcataaactctaattgaagactataaaaggcacatgcagtgttcatggcaccatagccatggatgaaaagactcatcattgtggagattggcagttctcaaattaatctgtggatttattaatacacttttgattatattcccaggagagatttttataaaatgcagaccagccaaggcaatattgaagaggcgcagacggcattaagaagctgcaattgcagggcagccaggccaagaggcaccagggccctcagcgcacagtgagcccagaagggccgcaagtggcagggtacctctgcgcactagggaaggagccatgttgctaaatggtgttgggacagctgatgccatatagaaaaggatgcagtgatacccctacctcacaccatgcacaaaacacatcacagtgagagacctaacctgtaaaagcctttcagagaaaaatcaagaggaaatcttcctaacagtgaggaacaaaaagacagattgaacaagagattgagggtaaagacatcaataggtttgactctacagacttcttcatgaccacaagaaaaatgtcacggttgtaatgtaagtggcagaataagaaaagatatttgcagtatctacgagttacagaatatatataaaaatatgtgcaactgtctgtcgtgaaaaaaaacggcaaacaccacacatcgataaggatttggggacattggcttgtgtgtgtcctgccgagagtgtagatggtcacccatttggggaatgaaatggccttccctggggagatcagagtcatgcaggatacatgactggcagttccgttctaggcgcttccttctccacccgcaaggacacgtgaagttgtcgactgtgacatggttcacaaagccaggggcagctcaaatgacggggttagttgtacagtggaaggtaacgcaagattaaatgagttaaccagagctgtgtgtcttgggccagataaatcctcaaagcctaacattaaagaagcaagttgctagaaaataggccccattttgacactgaagaggttttttgaaatgtggaaggcatgttacgttgttgatgagcgtgcgtaagcaggaaaacctcagcagcccctgggaggcgccctcagcccaagggacagccctcccaggcaggcgcaggggcagacgatgcttttactgtgtctaaaattatgcttctctatgaaaaaaaaaaaaaaaaaactcgag

SEQ ID NO: 2973 - DNA, 1628 bp, Homo sapiens
ggcacgagttacataccactcctttccctgtgtctgtgttttttgcttatgctcatctgtttggattttttttcctcctgacagaattgtacttaggcctcaaagcctaattcaaaaggtcacttccttccctaagcctaacctacctcccaataatatttaatggtaatttcctctgtgattacccctatagaataacgtagcagttatgttatttaagggtaacataaagggtatttaacccattatgttatgctgtttgtgttgtatatgtctctgctctcaaaggctgtgagctctatgaggacaggaactatcttaatcaattgtgtattcctagcaccccatacaagtgcctggaatatagctacaatcaataaatgtttgtaaattgaattgaattgaagggacattacaacattgtagtataaatcactttgtagcctgagattgatcactactgcaaatactaaaagtggaagaacatatacctttactattcagtagaatagttttatggttaaatcaatagcatcgtgtaacatgtgatgatgtgcgtttatgcatttatccaaatatttgtaagtttaatactgaccacgatgtatatggctattgaagaaaaccacacataatatgtgtgtgaggtttgaaactagctctgttgcctaaggctgtctttgtgccttgccagaatgtggaccgtggcatgatcggcctgaatatttagccatcctcatgatagcatgtggaataactggtttacarttcatycgtttcatacatactctgcctagcatgttaaaattaactggaaactgaagaattggagccaaagttagaaaatgaagagagttcaacttgaaaccatcaggaaacaggctgattacatgaaggtctttttgtttgtttgtttttaacataataaatagagatggggtttcaccatgttgcccaggtggttcaaacttgtgggctcaagcaatctcctgcctcagcctcccgaagtgctgggattacaggcstgagccaccatgcccatcctatattttttttcaggcaatatccttttgtgctcaagaaattaagacacacaccccaccacaaactacatttgaagactctgccaaaaaaatgccatgttttttctcattttctttcatcagtaattaatgataccaagaacacttatatgcatggtttatagcagttggctatggtcaaaaaaagttgggcttcccctctgagacatttgcagatatatgtcctaggtataccatcagtggcaaataatgcttatcttaagatctaatctcacagggcatgctggctcacgcctgtgatcccagcactttgggaggccaaggcaggaggatggcttgaggccaggagtttgagaccaacctgggcaacatggcaggaccctgtctctacaaaaaataaaaaaagttagccaggcatggtggcttacacttgtggtcccagtgcgcaggaggctgaggcagaaggatcacttgagcactagaggtggaggttgcagtgagctgagattggagtgccagtggactccagcctgggtgacagagcaagactctgtctcagaaaacaaaaaaaaaaaaaaaaaaaaa

SEQ ID NO: 2974 - DNA, 1957 bp, Homo sapiens
gaattcggcacgagcaaatgttggtttgtatatatattttttaaaaggcactagacttagaaatgccaaagtaattaattttctttattttcagaaacaatttagtgttcatggtacgaagtgtttctaaattgaaacactttcagattaatggatttaagataactggttgctcttttctataagtagtaataatgagatatggcttcagctacatatcagataccagatctcacttcctgttcctttatttcattcatccattcattcagcaaatatttgctgagcactaaaatgctccagacacagtgcatgaaccctgaagatataggcaaattgcataacccaagcaaagggccagagatgagcaacagcatggtacataccccaaactaagaacttcactatgggctagggatatataatttagaagaaagaaggttaggttggggtaggaggaagcataataaattatgaatttagagatgtaatcaaattatgaagggtcatgaaagccttgtacaagattttgagtttgatctccatagagtcatataattagattaattttagaaagctcatagtgtctgcagtgtggagagtagattagaaggaagcaggcctggaagcagggagatcatttgggagacttttccaggacagagaaaatggtggtctaaactgggatggttgcaagggggatgaaaagastagatatytaagagaaaatttaagaatacttatttagttcagacgttcctgaaagaatgagcctaaccatattcttgatcatctaaggaaggtctattccttctcaaggacagctaagtaaactaataattgattctaagtgatgtaattgaacagttcaaagcagttattcgtcattagaaattattgatactggtcagataatacctactgagagctagtcccattaattttcatcataattataatcatagcatttaagccatattatttctcagcatttcctatgttccagttttatagcactgaatattttaaatggtttatattacttaatactcacagtagctttacaggtagatattattgttatttccattttacaggtggagaccaaggcttagagaagttaagtactttgcctaaagttacacaggttgtaaatggtaaagctattattggaacctagtgactttttagttactggcccagctgggattagaacccagctctatcctgtattattatttccaagacttttatttttgttggggttaattgctaatattctgtacaacttcgttttagcccagtcttgcatataatcatattttctgcataaataagataagctagagtttgagtgagcacatagtgaagaatattgactatttgtttttttctttccaattagttagggtaaagcaagtgtaaagggaagtggatggtaaggcattttgaggaggcaatcaaatatgtttttttctaattatatatttccaagccaataatttctttgaagaagaatgttttaagcgtgtttctttaccatgttaggccagtaggtacagagaaaataatattagctctttatgtcagcataggtaacaaagccttaaaaaattcacagctgaatgcaacagtgaaggccgttgacaagagaggttgcattacttcaaccagggctactgcagtgaaccaaaaaaagaactgagttctaggcttccatctccaggctacatcttaactgactaagagggcagtttagctgtccaggaagaactcgattgctaactctcactgataattttgcaacagtgacaataaagaatgaattttaaaaagaaaaacttgtctccctgaactattgaactccagaaaaagtagtacttacagtctttgctttaagagaaaccagttaaaaaaaaaaaaaaaaaactcgaggggggcccgtacccaatcgcct

SEQ ID NO: 2975 - DNA, 636 bp, Homo sapiens
  misc_feature (31)..(31): n equals a,t,g, or c
  misc_feature (35)..(35): n equals a,t,g, or c
  misc_feature (40)..(40): n equals a,t,g, or c
  misc_feature (630)..(630): n equals a,t,g, or c
agaacacaatattgttttctgtctagtgtgngggnagtgnttttttatgtcctttgggagactgtagttgacttgccctgggggtatggacaagttttccatttggaagtttatttcatgttacttcatttatgcttatccctaccctcttctgtttggttcttgggtgttctgttactgtcctgtgttaacactgcattacaataccattaaatttggttacaaggattttraccttgtctttgtccctagtgcttcatacagtgctttggcatgttgttctgcacttattatgttgagtgagatttggaggaaggatgcaatccttgagcttcagggtttgtgagttcaagggttggggaacatgtcttcctcagtccttaagattgcccagatcctttctctaaccttatttcccttctcatttttgcagctttgtgtccctggtgatgttggaacattaatgatggaacatggccaaacttcagtcatgatcctgaagccatggtttcttccctgccagaaatgaaggttcagttatgaggcaaccctctagtaaggcattgtaaaagttactggatttggtttaataaaagttgaaataaaaaaaaaaaaaaaaaggggggccgntctaaa

SEQ ID NO: 2976 - DNA, 1320 bp, Homo sapiens
  misc_feature (831)..(831): n equals a,t,g, or c
ctaacagcgagaacgctttggtgaggacggagccctcacgacctcagcagtgttgcgttggggatcaggtttccgatggtgaacttggggacacgtccacaccacagcacgtgcctattgtgtttctcggtggctggtgtgtttgaggatggcgcgtgcatgcgttttccagctttctttgtggaggaagttacctgtgggtattaacctgtccccagccatcctctcactgagcttgggttgcctgggcctgggtttcctgttgttgctggaacgaatgaccacagacagtggcattagacagcgcaggcagacatgacctcctgggcttctgcgggtgccaacactgccgctccttctggaggctcagggaggctcttgagggcattgggacatcgtsctgccggccgccgggcagagccgktttgtttattttttragacttccgggaacatagttataaataactttaatttgccttggcctgcccactgcagtacagtcacgtgtcacataacattctgtctaccgtggaccacatatacgaccacgcggtcacataagctgacaatactgtatttttactccactttctctatttagatacacagttgccattgtgtcccagcagccttcagtamtcagtacagccatgtgctgtgcaggtgtytagctcaggggcatgrggccmtggcccagcccagtgtgcagtgggtggcaccttctggatttgtgtcagtcamtgtggagttcgcacaatgacagaytcacctgggaggccttccgtgsgsttctgtttctttctctmatttgattgtggctagaaacagnstgggaaccaggagtgcagyttctcggagtamgtggctgccccacggggtgggatgtgcattttcagtcacatttggggagagcacgcgtgttcttaagtttttagtgggttctagtaagaatggatgttgatttttagaattctctcctgtttattttttaacattttgtggtgggaatttgtgaaagaatacgaagtcaagagcatggtacggtgaggacccagcaccatctccaacctccccggggtccacgtggggtctgcgtgtggccgcctgtccctcagcacgatgtctgggtgtaaatctgagacatcacagcatgcaggctgcagacgtaggcatctctacaaaagaaggatgcgtttacaggagaatcgcttgaacctgggaggcagaggttgcagtgaatcgagatcatggcactgccctccagcctgggcgacaaagcycagactccgtctcaaaaaaaaaaaaaaaaaaactcgag

SEQ ID NO: 2977 - DNA, 1521 bp, Homo sapiens
ggcacgagaggacctgaaggtgcagctggagcacgtgcagactcggctgcgggagatccagccctgcctggcagagagccgggctgctcgtgagaaagagagcttcaacctcaagagggctcaggaggacatctcacggctgcggcgcaagctggaaaagcagaggaaggtggaggtctacgcagatgccgacgaaatcctccaggaggagatcaaggagtacaaggcgcggttgacctgcccctgctgtaacacccgcaagaaggatgcagtccttaccaagtgcttccacgttttctgcttcgagtgcgtgcggggccgctatgaggcccgccagaggaagtgccccaagtgcaacgcggcctttggtgcccacgacttccatcgtatctacatcagctgaacctgaaactcaggggactctggaacaccatggaccctgggggctgtgccccatctcctccccaccccaggtctagtggccccaccctccattccggaccccatgggcccagcccctgcccatctagttggtttggggaccctggtgcatgctagtgggcatgggatcagccaagcttcgttccatcttttcctaaaggtcagagctgcagcctagggggcactgccctacagaaaaggtctgcctgagaggcctgaggagcccagagcacttgactgagcttcccggaaactggccctaacctgtctgtctccgtggatgcatcctaaccctaaggaaaattccccaggctgtgatctaccctagagaaggctcgctccctgcctactggctcacaaatgaggaccagtgagccatgtccttgttccttgtttgagactgggctgcaggccccaggaagactttccttcacccaccatccccctaacctcggcagggcttctgtcctgtggagttccctggacaccttggtctggctcttgtgccaagggctgaaggaggtaccctcttggcagatgggggcatcacttgcttcctttgggaagctctaaggttgctgcagtcaccttcctcatcttgcaggtgctgaaccaacatcatcagtttctattctaatcaggccccttcccaatctccatttctctgccaagcccatttacccccacctcatgcatcccaaggctctactgggtccctggacctaaccctgctttcatcctggtggccttaactacagtggaggtggaacttcccaggaggggaagggacagaccagccccagccgctgggccaacttccaatcattccagctagaagagcttccccctgacaccctgtgactgagcctgtgtcctgtctgcctgcccagccatgctccatcggctgtgagggcagtgcccggagaggccagagggttggagctgcagggacccgtttggacccacagcctctgttctagagatgcttgtataggctgttaattgtgatgaataaacgttcaaccctcggcctgcagccagagtagccaggccgcgcaccccaaaaaaaaaaaaaaaaaa

SEQ ID NO: 2978 - DNA, 1103 bp, Homo sapiens
ggcacgagatcacttgtcaggatacaaaacatggtgggactctcagcgacctgggaaagcaagtgagatcattgaaggctctggtcatcaccatcttcaatttcattgtcacggtggttgctgccttcgtctgcacttaccttggaagccaatatatcttcacagaaatggcctcgcgggtgctagctgcattgatcgtcgcctctgtggtgggtctggccgagctgtatgtcatggtgcgggcaatggaaggcgagctgggagaactgtaactggtgcttcatcatcaagtctagagaagactttgggggcttcaggctccaattggcagtcaccgactcagtcaacccatcagactttttgtattcagctccagttagtcagaagaccagcccaggccagctgctgtttctgtggggagccctaatcttctgtgaatttccaaagggagcattggaggagattgagataacacatctttaaaacagaaagactggtcttggtctatcagtacctcttcctgaatctggtacccatctgccttctccagttcattctaaacactgctgggactagggtttttccatcaggagcaaatggaatccaggccttcccagaagtagaccatactgccttgaacttgtccatatgtacaaactgatcaccagctttctccatacatttttaatgcagacctgtaattgagttcagaagcctccaagaaaacagaaaggatcccctttctccagtttgtgctggaagaggagctgatcagagacatcaaataagagaaagatgggttgctagaggatggtagaactggaagcaaggcagctacctttttgcaaaaggaaatggtgttaggccccttttccagaagataagacagactcatagagattaaatgatcactatggtccttcttctgttaaatggagccaaagacgcctatgttgttctgaagtcttgtaatgtttaacttctgagaacttagattagtggtgtgatgatagagtctgtataacgcattgaaaagggtatcaggcttagttatttatccaataaatatttattgtatgcagggtaaaaaaaaaaaaaaaaaa

SEQ ID NO: 2979 - DNA, 968 bp, Homo sapiens
  misc_feature (261)..(261): n equals a,t,g, or c
  misc_feature (847)..(847): n equals a,t,g, or c
tttgtcccttggctttgctgcaagtctttttggaaagagacaagcatggcccagcccagaagttctagaagtccttggcctcatcttgcctcaagggcattgcttagagatttccagaatgtcattacttaatggaaaatctatagggtctgcttccttttgggacagcttggctctgcaccctggccgcctgtgtccttgtggctgggctgctcctgcccctgcctgccatcacttacctggcgtgtgcttggtgcgcanatcagctatatgtttctggagctgctttctaggagaaatctaatcatagaaaccaaactgaatggcattccttggcctcactctttgtaccctccatcttgggatccaggcttccacagtgcctttaggcctcccctccccttgaccccatcacacttgtccccattggtcactttggacttgctggtcctgctgcatggaagccctctccagcctactccacatgtgagtggggtttaaaccccactgacttgtttccttgtctgtgatgctgtccttctaccaatacttgtgtccagtcacttggtgtgtcctgtaatctatctgtgtctggaccaagactggtacactggacccaaggttcccagcaagctgatatgtggcttgtgtcatttgtccctgtgtcttctcctatctcactggcctcctatctccacagcctagtccatggagttgctttatgtagcaaattctccgtttggagcttttaaaataggattatttgccagaactgcatttacaaaaaaagtttgtgtaatcctggtttaaataaattacacaaagtaattcactggcagctagggtncctagtgtgtgctaggcataaagctgcttctgaacccactaaaagttcatcccagaatgatatctccactgagttcttaggtttattactagagatgaaaaaaaaaaaaaaaaaactcgag

SEQ ID NO: 2980 - DNA, 1544 bp, Homo sapiens
  misc_feature (808)..(808): n equals a,t,g, or c
gaattcggcacgaggttatccttggctgcaggtagtgaagaggtgtaccactctttaatgtttgtactgagtggcatgttcacaaaaaagctcagaattcagttgcattggcttttcaagagggatttgcagcaagggctggtttccaatatggtagtggaggaattggctaacataaaactagctcctgaaattcagacttgcgtttactgctctggctctatggaattagtaaccatgggaaagaggcaacgcttagaactgtgtaaagtgatggagtaggtagagacctgtcttgaagcatcggtaacagtaaatgaagcagcagcaagatcaggtgttctgtgccacattctttttccattcatgtttcatacaacattgtcttcaggaacatggttcagtgttctcccaacccacaagagacaagcaaaataaaaatggactaaataatttgctagtttttaattgggctctttggcacagactcaagtagacctgaactctcagctctgtygtgaacccgctttgtgaacaaggacaaagcatgtcatctgtctctgagccycagtctccctgttagtcagttacagagagagcgctccaagtttccttccaaagctgtgcactggctcgtttytccatcagctttggttttccagttggtctccagctcatctttgcctcacaagagcgtgccctgctagttgctggtgctgggagtgggtgggaaggtgattgggcgccagccccttccttcccaggcttcacacacacaccccaggaasccccgcggtgcgtcggactntctgtctagacatcatctgatttttatttgcaaatgcaggttgccaggtgacaggaccttttatgyttgtgccccacctgagtcccaggctcccggagtccccacagagccaagcataaggtctgccgaagccttggcgttctcaggtgagtgcagggtttgctcctggaggcaccgcaggaggccagcctctgctgccagctctgtcatctttgggcagattcgatgggactttagacacttgctttgctccctctggggtctggagtagatgtagacacatcctgtragtgaggtgaccagggtgatttaggagcaccattagaaaacctgacatcactgcttgtggttctgctgaccgtttcagccactggcttgaatggagtcattttggcttcttcactggcacctctctgaatttctaggaatgtgcctttacctttaccgagggcccctcttcagccaacattctcacgatgtggaataattgcttggaagtgtagaagggcttctcattttgagaagctgatcatccttccaggttgagccacaaataagtcctcctcctctactccctggggacattagttctggtccctcatctctaaaacattgatgtgcctaagagtaatacacattttggtcttcctctgaactttaatatagcttgcaaacaaatatggattcaatctgatttttaaagttttatttctaaaaaaaaaaaaaaaaaactcga

SEQ ID NO: 2981 - DNA, 677 bp, Homo sapiens
cggcacgagccgctgcgagaccgcagcccttctctggagtctcagagccgcaagacaccacgactcccagaggaccttgcgtcgggcaagaaagactacaccttccagaggcctctgcggcgccgcgacaggaagcggcgggcgagccgagtgtccttgcgcgtggatccgagcgaccatggtggcccgggtgtggtcgctgatgaggttcctcatcaagggaagtgtgcctgggggcgccgtctacctggtgtacgaccaggagctgctggggcccagcgacaagagccaggcagccctacagaaggctggggaggtggtcccccccgccatgttaccagttcagccagtacgtgtgtcagcagacaggcctgcagataccccagctcccagcccctccaaagatttactttcccatccgtgactcctggaatgcaggcatcatgacggtgatgtcagctctgtcggtggccccctccaaggcccgcgagtactccaaggagggctgggagtatgtgaaggcgcgcaccaagtagcgagtcagcaggggccgcctgccccggccagaacgggcagggctgccactgacctgaagactccggactgggaccccactccgagggcagctcccggccttgccggcccaataaaggacttcagaagtgtaaaaaaaaaaa

SEQ ID NO: 2982 - DNA, 1678 bp, Homo sapiens
ggcacgagcaaatatatagtagttccttattttcagttgtgaaaatgaaatggctaaagcagaagagacgtctattttagtcttttaaaaatgtgtgtgggtggtcttttttcctcagaagcccaaagcacatgtatattttgttatttctccttgctatattcctgagactatactaaaaactttaagaaaaggaacaagaaaaaggtaaattcatgtgttccccactgctgtgtctagaaccaagatcacattatatcattgttaaaattgtgttatctagaaagtgcaatatagggaaaacactctaagaatcttttaaaagcctagtgtttcccttatttgtcagaatatgtggtagtggcatccataagtatcttttaacttgcatttagcaggacaaatagtgtgatacttatactgatgacaatcatccccatttaatgaccagcagtcactgagcgctgtgaaaattcactcagtgataccccgtgttggtcttgaaggaaaccgtacatatgaatttttggatagctaatgtatatctctcaagtgccaacatttaaaacttgtaattatttttgatgtgagtatttcaggtatgttagtataccttcctgccttcttcttaaacatcatgctcagtataattcacattttcatgatgaaaagttaaagttatattcataatgtattattataagtatccagctctgatgtatgtaaaacacttcataaaatgtaaagggctataacaaatatgttataaagtgattctctcagccctgaggtatacagaatcatttgcctcagactgctgttggattttaaaatttttaaaatatctgctaagtaatttgctatgtcttctcccacactatcaatatgcctgcttctaacaggctccccactttcttctaatgtgctgttatgagctttggacatgagataaccgtgcctgttcagagtgtctacagtaagagctggacaaactctggggggacacagtctttgagacagctcttttggttgctttccacttttctgaaaggttcacagtaaccttctagataatagaaactcccagttaaagcctaggctagcaattttttttagttgcaactaagtaagatatactacaaactaaggatgctgctagactaaggaataaacagcaaggtaccaaagtacagcaaagcaacaacaaaggctctgtatttgcagaggggtctatcatgcttttaagaaaaaagaagagtacaggaaaaaaattcagatagacataagagtattttggatgccattaaactttgtcaataaccattaaaacataggcttaaattatcacgtattgttacaaagacacagttttgtctcattataaaataagattatatgaaatttatattctagaaatgattccaaatcatgtcctaagaatttctcccattcaaatgataatggaaattactgtcaaaaggaaaatctcaaagttaccattacgctgctctcttgtaaatgaactagggataaagatatgggttttatcaaaagccctaaggaatatatctcacattcacctcctatatgtatgtgtatatataaatgccactataaatgaaaatgtcacccagagataataaaataatttttaaagtttaaaaaaaaaaaaaaaaaa

SEQ ID NO: 2983 - DNA, 1679 bp, Homo sapiens
  misc_feature (20)..(20): n equals a,t,g, or c
  misc_feature (1517)..(1517): n equals a,t,g, or c
  misc_feature (1530)..(1530): n equals a,t,g, or c
aatccccctcactaattggnacaaaagccggagctccaccgcggtggcggccgctctagaactagtggatcccccggtctgcaggaattcggcacgagcccatgttgccctctaccagggtgtttactctcagatactgttggagttgccagctctcgcgggacatgatcagtcttttcaggcagccttgcagtttttgactctgttctttttggccccagaactgcatcccaaaaaggactccgtgtttacctccatgtttcattctgtgagaagagttcttgcagatcctgaaattcctgttcaggtcactcaggatattgagcctcatttgggagccttgttcacccaaatgttagaggttgggacgacagaggacttgaggctggtgatgcagtgtattctccagggactggatgtcagtaacatgtggaaagcagatgtgcaggctgttgtgtcagctgttacactgctgaggctgctactgaactgcccactcagtggagagaaagcaagtctgttgtggcgtgcgtgtccccagatagtcacagctttaacactcttaaaccgagaagcttctcaggagcagcctgtgtccctcacagtggtcgggcctgtcttagatgtcctggctgcactgctgcggcagggggaggaggccatcggcaacccccaccacgtcagcctggccttcagcatccttctcactgtccctttggaccatctgaagccgctggagtatggaagcgtcttcccgaggctgcacaacgtgctcttctcaatcctgcagtgtcaccctaaggtaatgctgaaagccatcccttctttcttgaactctttcaatagattggtgttttcagttatgcgggaagggcggcagaaggacaaaggaagcatagatgacctgcctacggtcctaaagtgtgcacgcctggttgaaagaatgtacagccacatcgccgcacgagctgaggagtttgctgtgttttccccatttatggtggcccagtacgtgttggaggtacagaaggtgaccttatatccagctgtgaaaagtctgctgcaggagggcatttacctcatcctggacctctgcatcgagcctgacgtccagttcctgcgggcctcgctgcagccgggaatgagagacatctttaaggagctctataatgactatctcaagtaccacaaggccaaacatgaaggagagaaaagatatacggcctaaggctatgggacagaagtgccgccagtgacactgtccagaggctttggctgcatggtctgaaagagctggagaatgaaagacttaagatgttctaattcgtagtatyggtatacatagaaaatcctttggggtttatgtagtatattttgatgtattttacatcgtgtttttcttactattttttaatacatagttttatgcagtaagtattgcaatagaatcctgaaaattgaccctgggatgagattaattcaatagaaaaattgctgactcttgggacctttctgtngtttggttctcgncttggctcagtggtttggtgttccctcgtctgcaytggaaactacataaaactttggctttttactttggtaatgggcgtataattcargccctgtttaaatatacttgcctttcaaattcttcaaggtaaccatgggaagtattcttg

SEQ ID NO: 2984 - DNA, 1425 bp, Homo sapiens
gctaaatttctccattttttcctctttccttttttttcttaccacacattaatgtgagaagattttacagactgccttttacccctatgtctgggtcactgatgacctctgtatggctaaatccagtggacataattcactggtagcttttgttgttgttgttgttgttttgttttttgtttgttttgagactatgtctccaaaacagtaacamcaaaataacaaaatggtactcattatcgtgtctactttgccatattctctcctcctcctgtctccacagcatccacttaagcccgaaccctctagaagccctcatccttgactcttcccccatytcactctatgtagctcattagtcactaaattctgtttgtacaattcctaaacttctattaaatttgtctgcttccctccagagtcctgctaattccctgaatcaggccactgccatctcatgcctgcgttgcactgaggacctccagtctggaagctcattttccatatctttacaaagcagatctatcactctgaactgttgtctcgacccgagttttgataggtattgtgctgggatctgaccattcaaaatacaatcactggaatctgaagaagtattctgtgggagtgaatggaaatatatatgacttttaaatgggcaaaggtaatgtttttctgtaagaattaaatacctgcagttgtattatttgaaggtgcattttcaggggcgagctgcaaaacatctgtcaggtcccaacatttgtctactggtgtttttttaaatgtggattgccaaaatctttattcatgatggacattatgtaggagtggttaatacttacatagcacttacctgtgtcaggcacactgatcaaaataaccgacgaagtattattcaacataaagaaaaatctaacttggatgtgaatgatcagagaacttaagttttaatttttaaacctttcagaaattgttaatatagatgtttataacttccaccttttaaattatttcacttattgaacagatattagtgaacttctaggtgctgaggaaacaacaaagagcaaagcaaagtccctgtcccccaggagttcgcgttttaacggggaagaaaaataagcaagtgaaatggacgactgtgagaagacggagcagggagatgttactattgcttgtagggtggtcacagaatgcctgcaaaaacaacccttttgaagaattgggaaaaaaataaaaaccatttggctgaaacagccctgagaagggcagcttcttccaccactctttcatcattttaccatctgtgggttatccccggggtcactgctatcccagcctaggttttatacaggatggagtacgaagttcccgcaactatccaaamggtaaaatgtgcttaaaaaaaaaaaaaaaaaactcgag

SEQ ID NO: 2985 - DNA, 1238 bp, Homo sapiens
ggcacgagtgaggtttcaccatgttggccaggatggtttgatctcctgaccttgtgatccaccctcctcggcctcctaaagtgctgggattacaggcgtgagccactgcgcctagcctcttgtggctctaatttattatgtagtactctgtggtctgtatattaacgtcttgcctttatcttttatattatatggtaaaaccctgatttttgtattttgaattttcttgtttaattgtacacatttttgtactgatatatcaatagctaatggcctctccccagaccaatggaaattggcatctttttagggggagagggttagattgggtctcaggctctgggaattttttaaaaagctcaccagatagtgctggtgtccagctagaattttttttttggattccacactaaaagcttaggccataaaagcaaaaataaataaatggaatgacgtcaaactgaaaagcttcttcaaaacaaaggaaacaatcaacaaaatgtaacaacctatggtctgggaaaacatatttgcaaaccatttatctgataagggattaatatctaaaattcatgaagaactcatataattcaataatagaaaaataatctgattagaaaatgggcaaaagacttgaacagatgttttttcaaagaagacataaggatggctgacaggtatatgaaaaggtactcaacagcattagccatgcagaaatgcagatcaaaaccactgtgggcgtcacctcacaccccttagggtggctgtcataaaaaagtgaagtgataaccaatgttggcgagggtgtggagaaaatggaccccttgtacactgttggtgggagtgtggattggtacagccatgatggaaaatagtatggaggttgctaaagaaatgaaaaatagaagtactgtatgacccagcaattccttatctgggcatatacgtaaaggaagtgagatcaccttataaagatatctgcactcccatgttcattgcagtgttatttacattagccaagctgtggaaacaacctgaatgtccactgatagatgaatggataaagaacacgtgatatgcatatataatggaatattattcagccttaaaatgcagatactgccatttgccacaacatggatgacctggaggcagtatgctgagtgaaataagccagacacaggaagaaaaatattgcatgatctcatatgtggaatcttaaaaaaaaaaaaaaaaaa

SEQ ID NO: 2986 - DNA, 1117 bp, Homo sapiens
ggcacgaggagaactaagcattaggagaagcagcatggggctcaacagtgaagtgacttgttccaggcgggtcctcaggagtggctgtgcagccccagtcacttttcatcacaccggagagggacgcacaaccccagtcctgtttagttgcagatataccgagaagggagagcccacaccgaccttaaggtcacttgggccctgaatcctatgcctctcgttccactgcttctcagttgccctcctacctggctggccaggtttggagtctctctcccctgctctggcattccagtcttggcctgaagcacgctatgcctctcatacagtctgccttttctagggtccaagcagcatcccaagttctgttgagatgcagcttgcagtccaggaggacaacggtcacccccatcttcccatgtttttcttgctttaagccctcccctaagctttcacatataatcaccaggggttcagaaattgtcagccagttctccttatgctttaagtagattttcttggggccagatgtcttgaaaaacgctctcctgactcagcagttcctggaatttttggcctatcatttatctcactgttctgagtttacttgtaagcctcttggcttaatgtttgaatcaagatgagcagtaataacagcttcttgtgtaccaattactcagaactcacttaaattgccttaacactttttaaatgttcttacacatttgaaattctttagggagggatttccagaactttcctaaatttctccacccatggcatgacagtacttagaggggcaagaagttcaattttagaataagctcttctgggcgcgatggctcatgcctgtaatcctagcactctgggaggccaaggcgggtagaatgcttgagcccaggagtttgagactagcctgcaatatgcgaaaccctgtctccacaaaaagccagacatagtggtgcatgcctgcagtcccagctacttgggggcgctgagttgtgaggatcacctgagcccaggaggcagaggctatagtgagccacgatcgtgccactgcactccagcctgggtgacagggtgagacgctgtcgtctcaaaaaaaaaaaaaaaaaaa

SEQ ID NO: 2987 - DNA, 1640 bp, Homo sapiens
ggcacgagctgacctgaccttttccctgccttcaggacttctgggcccagccctcttgccaggcatgcatatgtgagatatgcatatcatgtatgtgtcctcttggggtgagacttctgcacagccatgcctgcctctgaccagtccacttttcatgttggggctgtaggcctggggcaggttcagagtctacccaagtacctatgtatgagcaggcagcagcagggcatggccccatctctccttttagcctctgtgtttcattaggcattcatcctgccaaccagggcaggcccggcgtctgggctctgggaacaaatggggcccacatcctggagtggcaaattttgggggatgcgctacctgtcccagcgggccctgtgcctccaacccagagctccccacagacctggtgtaatttcacaagggccatccctttccccaggcttccctgagggaggcggaagtttgaacccttatgtggggtcaatggggctagggtagtggtatgaggtttaaaactatttaaggattaggaggagaaagagtcttcaggaaactcttgtttcactggactctgcagcctgcagaactggggcaagggtaggagttccagtaggggaaggagcaggtagactcttcagctgcctcagctgggactgaagacctaagctgattctctttcctctccactcctaagaagcaattttctgttcctctccttccaccactttttactttctgctatctcccatctcccgcttcccttccatttcctttctagaaaaccctggtatttagctcaggccaaactgcctcagcagaaaggtggccttggacaaaactggtccaagaatttgaagtggcagtacttgcggattggctctgtccagcaaggcctcagctgcttgttgcgtctgctttccctcccctaacagaagggtaccctggcttattcaggggactccttagtccacactgtgtcacctgcatgccttaatctttcattgctggggtgtggcttgggagatcctgggccagcccctccacacatctccctaagtcagagtggctgctggccctggtagatttgacttgctcttgcctcactcgacctccaaagtgggactgaagacagtggtcaagagacttgagttcgggacagtaagccaggggttaaggttctttcctttttttgaaagccaaagacccagtttgcattgtgctgctgcattcatggttagaagctttccatgcctaggttctagggaatttatttttctatgtgtatatattttcaaactttgtttcctgggtactgggcatgtgcctgtctgagccccaggtctgtctacaccccaccattcattctgtctgtctgttccctggacactgcctaaaagggtctcaagacagtgccctgtgggttcctaggactagggcccatcactgttctcttctgctgggaaatgcagctttaaaatggctaaccacagcagagggcagatgcttgatagattatcttttccttgctttcttgtttctgttttgaaagtgaaatggggttttaaattgttatttaaactctttttccaaataaaggtttaccttttttccccccaaaaaaaaaaaaaaaaaaa

SEQ ID NO: 2988 - DNA, 2060 bp, Homo sapiens
  misc_feature (8)..(9): n equals a,t,g, or c
  misc_feature (44)..(44): n equals a,t,g, or c
  misc_feature (1938)..(1938): n equals a,t,g, or c
acccgccnnaatttaaaccccccctaaggccaatggtacggccncccttttttttttttttttagaagaaatacggactttaatgaagagttttccctttggtataagtgagacccgtggaaacatccaaacagcaaaaggaggccaggatgaaaacggtcaactctcccttatccacaaggccaaaagagggggggccggcttgctgtggtgtggccaccccgggcctaggctgggccgggcctgtagaaggtactcaggaactgcaggttttgcgtttcccctccatgaaactgacaggcattcgggctgacttctgcctctcagtctcgcggtaagagacccaagtttttctagtcctagatggaaataaatttcatctgcctcaggtctctggtataaaaggtgcgatcccagttacctcacaggcctaggcgaggaaaatgccaagagctgtaaaagggcttggaaaagtcaaaaaggtgatgtataaatgtaataattgattatcattttgtgctcaagaataagcaatggaaaagaaaataggaaagtaagtctacagccctaaaatatatgcatataaaactttaaaagaatgcagttccaactctacagatggtatgtggggattgtctactgctttatagtctcaatgccccttttctcacctccacaaaatccacctgggagagttaactgtacaagaggcccaaattcagtcacccccaccccgccctcccagaaagggaggcagggcagaggcttcaggaggaagggctgcactttggcgtagagtacataggcatgcaacatgggagggcaggccttatgaaatgtatatacagaccccttggggtgaggggccccggccaggaggcactgagcaagggaggggtccatctcccgcctggccgggagtggggctctggggcaatctctaagggttgcatatccccagggagaggggacagctgccactcctgcctctgttatcccaacccaaaccggagagggtgctcagcaagaacacaggtcccagaagccaagaaggtgttggcatccctgtcattgaattcaggggtccaagaactgtttgcataaaatatcattagacctaagagatggtcaaaggcacaaagtttaaacatggggggggcgggtgttgagaggggtctgggataccctgaagcccagaggtgtgatttgttcccccttgcccagaagggtgactgttccactgggcctgtcaccacaggacattttccatgacaagcactcaccttcttggggaaggggcatcaggttggcacaggaaaggcccaggtgaggggccactctgtacattaatactttggtgattaatgtttggggagaggcaggattctcacccaggcttttgactcaaaccctctcactcagctggatatgaaacccagagtccatgctactcccagctctgacacaaggccaagcccacagaacactcccaaacgaggtcccgagagttagggaatagggtggaaaggattggagggcatcttctggaagagagcgctagggcagatcacagtttccgctccacaggttgctgtagacacagttcgctgccygcagagatgatgggcaagtgattgtccatgtggtagctgataaggtgactgacactttcaaagcggtgatccttagtccgaacctgggagggtgggaaggaagaaggtcaattcaggtgaagagtcaaataagacctcagcctccaaggtggaagagggtgaaacagacmagaggcttgaaggaggagaaaaaaatggtgggggagagtgtggcctgtcaatcctgatcattgaggcttctctagaaagagacagttgtaggaatagacaggtcagtgaagtgagaaaaggcaaaggcgacatcagccctkaaagagtgaagctnagagctatatacccctttcttgacctggaggaagttggcatgtctcagaagagtatacacagtgcaaaaaaagatgtggaggctgggcatggtggtccgtgcctgcaatcccagcactctgg

SEQ ID NO: 2989 - DNA, 823 bp, Homo sapiens
ggcacgaggcaagataaaaatgctttcaaagaaaactaaatgaagacacctccccagatatttactcggagatgtattagtgcttaacatccaataggaaaattgagcccattattcataatacacagaaagtctcattgaactcaagcacattctatgaagctggcatcaacattccttcaaggaattcctacagctggatggattgttccatatgaggattctctcactgcaataatagctttcactccagggaggaagctgtattcccttcatgctgttgctggtatttttagactgttaaactcttcagttgctgaagggtatccatttaccacatatttattaggctaccatatgggtagtcagtgaagggtgaagggcattgactgttggtatcctgagtgtctgagacgcctttaatccaaagatctcaaagtactccaccaactagaaatcactccccaaccctggagcttctttagaatgtacaaaatactggcccagttgtcagtcattaggtaaattttcagactttttttttttttgagacagagtctcactttgtcacccaggctagagtgtagtggcacgatcgtggcttactgcagtctcgatctcccagctcaggccatcctcccacctcagcctctcaagtagctgagactacaggcatgcatcaccacgccctgctaatttttttatttttattttttgagacggagtcttgctctgttgcccaagatcatgccactgcattccagcctggacaacagagtgagactccatctcaaaaaaaaaaaaaaaaaaaaaaaaaaaaaaa

SEQ ID NO: 2990 - DNA, 938 bp, Homo sapiens
ggcacgagagaagttgtcctcaactatcagtaggtttttagagatgaacatcactcgaaaactatggagtcgaactttcaactgttcagtcccttgcagtgacacagtgcctgtaattgctgtttctgtgttcattctctttctacctgttgtcttctaccttagtagctttcttcactcagagcaaaagaaacgcaaactcattctgcccaaacgtctcaagtccagtaccagttttgcaaatattcaggaaaattcaaactgagacctacaaaatggagaattgacatatcacgtgaatgaatggtggaagacacaacttggtttcagaaagaagataaactgtgatttgacaagtcaagctcttaagaaatacaaggacttcagatccatttttaaataagaattttcgatttttctttccttttccacttctttctaacagatttggatatttttaatttccaggcatagcaatgttatctattttaatgtgtatttgtcacaataacagaacatgcaagaacaatcattattttattttataggcatttgattactattctagacttctggtatcttcttactaacataagtatctcaagtagaaaagtttttgaaaactaacatttaaaaattaatcagttacagtaaagactttgaaaaagaaatgtacttgttaggaagtagcttaattaccccccattgcagtattattgttatatatatagttaatatgttgtacatcacaataatatataattcagtctctagtttccctagagtcatttttgaaaccactgactgcaaacctccctgacaatttttaaaagtagtaagccacattacatttatctttgtaaaaagatttatggtaactggtttcttacttgacttttataaatagtattttacatcttaaaaaaaaaaaaaaaaaa

SEQ ID NO: 2991 - DNA, 1896 bp, Homo sapiens
ggcacgaggtaaattattggttggtaagcctcttaagtcttaaaaggtaggttcccctccatctcttttttatacaaaaccaactttttactaggctttacttctgaattaaattcaagcggcggctattgacagcagcaagaacctttgctgtcccacgcgttcctcctgcagtgttctctgtgatgctgcttggaaggctgatggactgttcagctggtgtgatgatttgggtagctcagagccctcatggttggggacctgacacatgaagagccctgaatatcactatgggtgagtgtggccttactttttgctgcttcacattaacggtttggctttgcctgcagccagtattctgaccttaatgtcacacttgcagatgtcagcccaggcttggtacaggggcaaaccttttcaggcttgagcagaacccagttaggttccgggtgttgactgttctagaaatggatttccaggactacatgagtgggttcgtgtgttttccccagaaaatccagaactgatgataaatagaaatgtgaaaaactacttcagttacttgactgtttgttagtaaaaaaaaatcagtaattcatccttgcccacctaggtaggcggtttatccaacttctgggtctcttgcccatggaaatcaccatcttggatctgttgctctcccagaacagtattatgaatagggctaaaggtcagaatacccccactgcccttatgacagatgggaacatctcccaaataagacagtctcaagcattcatgtaataaaataactttattagaatcaggaatttgttaaaataatatccttcacatatagctaaagtgcaaattctcttgctctgtagtagaagcaagcacatctgtcagacctccgtggtgtgcttataaaaccaagacgagaagagttttaagaagtacctctggcagcataagagtacgaaaacacattttataaaggtttgaacaattaccatttggagccatttcatatatcgtgtatgtcttttcacttatttttcttaacctttcaaaaactactctgtgctatttatacaactgaagaactgtataaactactttagagcagtggcctcattactgtcaggaacggaattaccaaatcaaagagacaacactgcgtattcgccatcactcacacactgacaaagtgcagtagtgttagacatcatgggctctgtcactgggaaagggacccagtgacttccacctctctgactctaaatagcagcagtcatattggcacctgtaccatatgattcaaagagaagattctacttccattggatgacagcttggaaactcggccatattacatagagcactacatcatttcacaagttgcgagaaaaataaggccactccgaggcaatctcttctgcctcccagggggatgggacacgggacagtgcaaagaccgtggaagatggcagtaagtagatgaaactccaggaccaaagggatgcagcctggccatggctgaaggtttttgctccattcagtagaaactggtgctctaattcattatcaaaaatgcttacttggtgtccacatggcatttgttttctcaggttaacatctgcctacagaaaactcaggcagaggggtgagggcagatgcctactagcataacacctggtttgcagcacgatacaggtggaatgacaagcccagagaatttcagacgaaaacatctggcctgagttgctacaaatgaagtgtgagagaaacgcggatacacaaagaaaaccaaactgcccgcccaccatgtttccccctccaacatacagctctttatggctaccccctattcttaattagaaaaatagtctcaatatgaaaaaaaaaaaaaaaaaa

SEQ ID NO: 2992 - DNA, 1494 bp, Homo sapiens
ccaaggagcagcctcaagcccagagaagactgaggctacggggaacttcccttgctgcaggctgttgtaacactttaagggccccaggtctccactgccaagcaggacttggcacatgagcacccaccccacagcaccatcaggcagcacccatgggctccaccagcccagctctgtccctcccctaggtaaagatcacactgaagtcttcaagtccccagcaaccaagttgggggtggtttccttcctcttcaggcagccaggcccatggctggaaggccgggctggaggcccagggaatcggttactgatgtggccaccctattcccacatggggagcaccaggagccctggagccccttccacccaatcccatctcgcaggagagcagggtctgggctcctgcctcaccgctggttcagcagcaccctccccgccgggtcccaccttgccttttgaagaagagcccgcataatgagtggacggcagacagctatatttagtggtgcctcgacactcacgaaccgccagcgtggcgcctggatcttgcccagctgccagctccccccaccaggactgtggttcctcagtttctcctgccagccccggctcatctcagggcaaagctatagacatggtagatctcatcggggaggttctcctgcctctcctcggccaggaggctgaggcctgcactgcagatgatcctgcggaccacgtcaaggtcccggcacacgctgctgtccacgtcgtccagaatcacgccctcctgggccatgttgtctttgatgacgatgatgccgttggggcggaggctgcccttgcagcgccgcaggaactcggccaggtgctgatcggtgaggtggcctggggagggcagaggcaaggttaccagggcaccatgcaagcggatgtcggcactggatgggatgtacttctcagccccgctgagcccctcatttgtgcccagcattttgtgtgcacacatggcctcattggctctcagtcccgagagatttactaaaccccaattcatagaataggaaactgtggctcagaggtcatctacctaaagacacattaagccagaatttgacttgacgggatggcttacaagtcctgcctgatacctacacaccatgatgccccacccctgccaggcttggatcggaggagtgaacctgggccaagagtttggcattgcaggagctcccagagagactgccttccctacactagaagtccccacaaaggcttctgagaccacaaaatacaaggccagacctagagtgtccacagcaggcctgtgctgcccgcctcaggaggtggccgactgctgctagcggcctgccgccacgtcagcagcccagggcacagcgctcgaggtgtgctgttaggctaagagggtgcagggctagacacgaagcttaaactattcatcttattaaaaataaaacccttataaaactccaaaaaaaaaaaaaaaaaactcga

SEQ ID NO: 2993 - DNA, 2836 bp, Homo sapiens
  misc_feature (1615)..(1615): n equals a,t,g, or c
gcgcctcgccgggtctccgcttatcacacctcaggtgcggtgggcttcgggtggggggcctgcagctagctgatggcaagggaggaatagcaggggtggggattgtggtgtgcgagaggtcccgcggacggggggctcgggggtctcttcagacgagattcccttcaggcttgggccagagtcccttcgcacggagatcccaatgaacgcgggcccctggaggccggtggttggggcttctccgcgtcggggatggggccggtaccctarcccgtttccagcgcctcagtcggttccccatgccctcagaggtggcccggggaagcgcgccgccctcttcttcgctgcggtggccatcgtgctggggctaccgctctggtggaagaccacggagacctaccgggcctcgttgccttactcccagatcagtggcctgaatgcccttcagctccgcctcatggtgcctgtcactgtcgtgtttacgcgggagtcagtgcccctggacgaccaggagaagctgcccttcaccgttgtgcatgaaagagagattcctctgaaatacaaaatgaaaatcaaatgccgtttccagaaggcctatcggagggctttggaccatgaggaggaggccctgtcatcgggcagtgtgcaagaggcagaagccatgttagatgagcctcaggaacaagcggagggctccctgactgtgtacgtgatatctgaacactcctcacttcttccccaggacatgatgagctacattgggcccaagaggacagcagtggtgcgggggataatgcaccgggaggcctttaacatcattggccgccgcatagtccaggtggcccaggccatgtctttgactgaggatgtgcttgctgctgctctggctgaccaccttccagaggacaagtggagcgctgagaagaggcggcctctcaagtccagcttgggctatgagatcaccttcagtttactcaacccagaccccaagtcccatgatgtctactgggacattgagggggctgtccggcgctatgtgcaacctttcctgaatgccctcggtgccgctggcaacttctctgtggactctcagattctttactatgcaatgttgggggtgaatccccgctttgactcagcttcctccagctactatttggacatgcacagcctcccccatgtcatcaacccagtggagtcccggctgggatccagtgctgcctccttgtaccctgtgctcaactttctactctacgtgcctgagcttgcacactcaccgctgtacattcaggacaaggatggcgctccagtggccaccaatgccttccatagtccccgctggggtggcattatggtatataatgttgactccaaaacctataatgcctcagtgctgccagtgagagtcgaggtggacatggtgcgagtgatggaggtgttcctggcacagttgcggttgctctttgggattgctcagccccagctgcctccaaaatgcctgctttcagggcctacgagtgaagggctaatgacctgggagctagaccggctgctctgggctcggtcagtggagaacctggccacagccaccaccacccttacctccctggcgcantttctgggcaagatcagcaacattgtcattaaggacgacgtggcatctgaggtgtacaaggctgtagctgccgtccagaagtcggcagaagagttggcgtctgggcacctggcatctgcctttgtcgccagccaggaagctgtgacatcctctgagcttgccttctttgacccgtcactcctccacctcctttatttccctgatgaccagaagtttgccatctacatcccactcttcctgcctatggctgtgcccatcctcctgtccctggtcaagatcttcctggagacccgcaagtcctggagaaagcctgagaagacagactgagcagggcagcacctccataggaagccttcctttctggccaaggtgggcggtgttagattgtgaggcacgtacatggggcctgccggaatgacttaaatatttgtctccagtctccactgttggctctccagcaaccaaagtacaacactccaagatgggttcatcttttcttcctttcccattcacctggctcaatcctcctccaccaccaggggcctcaaaaggcacatcatccgggtctccttatcttgtttgataaggctgctgcctgtctccctctgtggcaaggactgtttgttcttttgccccatttctcaacatagcacacttgtgcactgagaggagggagcattatgggaaagtccctgccttccacacctctctctagtccctgtgggacagccctagcccctgctgtcatgaaggggccaggcattggtcacctgtgggaccttctccctcactcccctccctcctagttggctttgtctgtcaggtgcagtctggcgggagtccaggaggcagcagctcaggacatggtgctgtgtgtgtgtgtgtgtgtgtgtgtgtgtgtgtgtgtgtcagaggttccagaaagttccagatttggaatcaaacagtcctgaattcaaatccttgtttttgcacttattgtctggagagctttggataaggtattgaatctctctgagcctcagtttttcatttgttcaaatggcactgatgatgtctcccttacaagatggttgtgaggagtaaatgtgatcagcatgtaaagtgtctggcgtgtagtaggctcttaataaacactggctgaatatgaattggaatgawaaaaaaaaaaaaaaaattccggaattcgatatcaagcttatcgataccgtcgacctccga

SEQ ID NO: 2994 - DNA, 1073 bp, Homo sapiens
ggcacgagaaaaactcaactcgtctcacaactcagaggtacaatgaaaaggagtttttccctctgtgattggaactttctcttgagccctttcccttaggggatactaggagacaattacatctctaattcaacctaagtttattcccttttagtggggttcaatttctgttagccaaaagtgctcagtccctcaaacagcttatcttttgttgtttctctaagattgtgtagaatttggaaagggtatagcttatttgaccttatggctttgtgcggaagccggggtccccagtagatctcctggcttctggataagtttctttgctgctgggttgctaggtgcctcattggcctccactgccaacttctgggtggttattacttagggttgtgactattgcttgggcaatgcacctgcaggtgctttctgggcaattccatttcatccggctcttgatggcaacatcagcaccttggggacactctgcgatatgtgttttgcttctgttttttgtcccggattttctgcagggtcccctgtctcaataaggaaaactccttctatcagtttatccagggtaggcaggcaggtacttctaggtccgacgcagtgtgcctcagtggaccaggatcatggacacaggacatgggtaagttcctgaactcctctctgcctaaggttcttcatctatcaaatgaaagtagtaatagtgagtattcactgaacacttcctatttggctgcactttttaatgtgtttcatattatgatgtgccaggcagagctctgtaataagtcagtgcttctcaaactctctgtggtaaatgattaccttttttcttgaatttccaatttgccacagatcaatatttctgcaaagtactttaaaagttacttcctatgagcttttacagtgacaaatgaaaattttaaaaaaaaccttaaaattgaaatcactgtacaaattagttattggttataaattactacaaacacttcaataaatatttaacaaataaaaaaataaaaaacttaattcctagaaaatgacataaaaaaaaaaaaaaaaaa

SEQ ID NO: 2995 - DNA, 1290 bp, Homo sapiens
ggcacgagttgcagagccaccttagggcacaggtggtggctggctgtgggatcctcttctcatgcatgacacctctaggcatcgggctgggtgcagctctggcagagtcggcaggacctctgcaccagctggcccagtctgtgctagagggcatggcagctggcacctttctctatatcacctttctggaaatcctgccccaggagctggccagttctgagcaaaggatcctcaaggtcattctgctcctagcaggctttgccctgtcatggcctgtcttcatccaaatctagggggcttcaagagaggggcaggggagattgatgatcaggtgcccctgttctcccttccctcccccagttgtggggaataggaaggaaaggggaagggaaatactgaggaccaaaaagttctctgggagctaaagatagagcctttggggctatctgactaatgagagggaagtgggcagacaagaggctggccccagtcccaaggaacaagagatggtcaagtcgctagagacatatcaggggacattaggattggggaagacacttgactgctagaatcagaggttggacactatacataaggacaggctcacatgggaagctggaggtgggtacccactgctgtggaacgggtatggacaggtcataaacctagatcagtgtcctgttggtcctagcccatttcagcaccctgccacttggagtggaccctcctactcttcttagcgcctacctcatacctatctccctcctcccatctcctagggatggcgccaaatggtctctccctgccaattttggtatcttctctggcctctccagtcctgcttactcctctattttaaagtgccaaacaaatccccttcctctttctcaaagcacagtaatgtggcactgagccctacccagcacctcagtgaaggggcctgcttgctctttattttggtcccggatcctggggtggggcagaaatattttctgggctggggtaggaggaaggttgttgcagccatctactgctgctgtaccctaggaatatggggacatggacatggtgtcccatgcccagatgataaacactgagctgccaaaacatttttttaaatacacccgaggagcccaagggggaagggcaatgcctacccccagcgttatttttggggagggagggctgtgcatagggacatattctttagaatctattttattaactgacctgttttgggacctgttacccaaataaaagatgtttctagacaaaaaaaaaaaaaaaaaa

SEQ ID NO: 2996 - DNA, 1629 bp, Homo sapiens
ggttaaatcaagatataataggtatcactaccctgtttctttcaagtcttttgatggtgacattaagctctttaattcttgagatgtggtattgcttctggcttaatatcttagtagggagggtaagttctaggggcttccatttagcccttactattaaaatgactcttatcagttgggtcagaaagccaatatgggagctctgccaatagtcaagtatgtctgttccaagtatttattcaggaactgaggagatamcaacaaagtaggcccattgtactatggggtccactgtgaggtggacttgagctaagcatttcatctattacctgaccactgtcagcactcactttgactgataggccacagtagcattttgagtccccaggaattagtaatccctgaaagtctgggtatttccttttctctaatccgtagtcactctagtaaatggcctttggggaagcttggatgaggatttacagtatgtacttgtacttgtgggaacactacaggtttttcctcaggggacctgggcttgttaattgacttgggtctagaaattagatgagaggtcaaaacttttctagtccaggttttcactaccagagctggagttttttcagttgtacagatgaawcyggtttggtaggctgcttgtggaatactgtgtgatcaattactgccaaagatcctggtgggccaaggtgttctgattaccagtacaactttactgtatttatagtagatttcccaccttgtctttggtgattacatgctgctacttggcctctgttattttaggatcccgttacccctttaaatcagggaacccacttagtggtggcatttcccatggccatacctaggggttgtgacagagaccttagggactgtaaaacctaaaatgtttatctgtggccctttataaataaagtttgccaacccatgtctaggggaacagggacacactgcaaaggggagcaaccacagagcttttcaaggatgaaggtgatcccctcactaatgcatttctttttttgttgttgtttgttttttttttgtttttttgagacagagtctcactctgtcacccaggctggagtacagtggcacgatcttggctaactgcaacctctgcctcctgggttcaagcaattctcatgcctcagctactctggaggctgaggcaggagaatggcttgaacctggaatggggagcttgcagtgagccaagatcgtgccactgcactcctccagtctgggcgacagagcgagactccgtctcaaaaaaaaaaaaaaaagcattcataaaatgaaactaagcggggaaaggtaggggagagtcatggctctcctcccagcagagtggaaatctttagatggtaattaagaaatgggatgaccagcctgggcaacatggcgaaaccctgttttacaaaaaaatacaaaaattagtcaggtgtggtggtgaacttctgtgggcccagctaactcaggaggccaggatgggaggatcacttgagcccaggagtttgaggctgcagtgagcagtgattggacaactgcactccaacctgggtgagagagcgagagcctgtctcaaaaaaaaaaaaaaaaaaactcgag

SEQ ID NO: 2997 - DNA, 1610 bp, Homo sapiens
ctgatgcagagatggaggatgtcaataaccctgggctcagggtcagagcccagcctggggactatgtgctggtgaaggtgaggagtccttttgggcttttggcttgcactgtgaaatgagtgttggtttggatatttgtggtaataaagttttttcctagagacacattttagtaaaataaaaatcccctctcaaccagtacaatggaagggcactttggattggattttagactgctccttactaatgccttcttattcttcttacctattctcctgccctggaagcgttctttgtgggaatttggtgagtttggagtatgcagtggcatgtagtttctcgctgcagagaggccaggaggtggagtgatttcgagtgagtagagagtgttccctgttggagatcaacattttctttgtgatctctgacggctcaggcctctttaacttacatgtgctcgagtttcttgggtctcttccctggactcacagatcagctatatggctgtgggattttctctccctttctttctctctttctttctccctttcactggcgatatgcttctcttattgtctccttccatttcttcctttctcctgccttctcttctcacactgcccagttctgctactgccaccttccctgtcttgttctcatatctgcttcgcctcagaaccagaagctggcaggacacagactgatgccctagagcatccacagaagttcctttaagggcagggaaaatgcctgttttgtttctgtttgtttatctttgtttatcttctagcacctagggcaattccgggtacaaaatatgtacttagtaaggatttactaatggacygacttgctcttatgataagacatgtgaccacagataactttggggtcacattcttttagctctcaattggaggaragagaacatttctcaccaaatgttggctgtaaatatcctaaggaaggatttgactggatcagccttggagttaggagggcagggcctgtgatgggcagtttcacctgaattttatggttagagctgaggaggagccatcttccaagagaaaagggagaagtggctgggactgacctgctttgacttcttaaattatatccattgccattccatgagacctcgctccctgccaggatcgggggcacacaggagccatgtggtctctgccagccggtcgcctccatcagattccttttgggggcttctcctctagaggctccacatgaagtcccagtgctacagtcctagttattttgccttcttctgcctggttttctttcagatcacctcagccagttctcagacacttaggggacatgttctctgcaggaccactctgagggactcttctgcatattgctgacctgagaggatggcctcagagctgacttgggcaatcctccccaacaggaaggggagacattgcctgccactgaggaaacaggtcatgaaggtggagataagctgcaaggggcgaagcaactttatgtcagtggaaaacgtgtctctttaaagctgctatgtgaacagcttttacagtcattaaatttacctaaactaaggttaaaaaaaaaaaaaaaaaactcga

SEQ ID NO: 2998 - DNA, 1945 bp, Homo sapiens
ggcacgagcccaactgagccctacctcccttaccaaagaagttcatggccaagccatttttatttagcaaataagggcttgttttccttgattgtccaaagcacaaggggagaaaaaccacccattggcttcatgtttacctgcactgcggggctgtcttgtctgtttcagttctgtttcacatgtggagttttcactgatttcaagaaggaatgtatgcatggagttgagcaggatacagtatcctgaatgagggctgaatgttctgcactagaagtgagcgtatcaagtctttgtaactaagaatgtgatgttagattgtagctgaggggaagaaacacaaatggcttgggttgtatctaaatcctgggtctgccaggtgaaaacttagatgttgctttcaaatgacactaatgatttctttcagtgctgtttagcatgagtggtcattgcaaagagctgtgaccactgtactacccagtatggtggctactggtcccatgtggctcttgagcacttgaaatatgggtaatctaaatggagatgtggaaaatacaaactggattttaaagacttagtagacttagtattttgaaagagcaaaatagcccattgacaattttatgttgattatacatacattaattttacttgttatcttttaccatttttaagtgcagctactaaaaatttaaaattctgtatgttgcttacattatattgctcttggacagcactatactaaaggcataaatgtaagattgtgtttcagagggcacccgagcactgcttggtttatatgtattttctaggccttccctttggttccctggttacctttaaaaatacatgtcatgatatagacatggcatatctgagacaaaccttggactgagacaaacctgagtttcaatctcaattgtttgtttgtggcttgcctctcagcatcttaaattctctgaatcttaagttcctccactgtgtaaaagaaataatatccctctgacctcactgtggttaggcaagagacaatgcagtgattttttcagtaatattatgagacattttattactataattaaatgattgtattttccccagattgacaaattcaaattttctattttgaaatcttattgcaaatgttaaaaaaacaaacaacccaccctttggctcctgttatgttgtcttccagctgctagtaatggaattgggacagctaatgttccctgagagccatggggaaccaggcagtgtgcttttcaggaactgtcttactttatcctcacaacaatcccaaaaggaaaaacctagttttatctctatttaatagctgcagtgactgaggcaccgcaaggttaggtgacttgcccaaggtcacacagcgaagcattgagcccgggcagtccagctctagagccgtgttctttgcctccgcccaatattgtccaccagtgaggagaagacggaaccaaagaaccaacagtgaatgaatactaacaggaatcctggctttcatggacatctattcttgtgatttgacagtgtatatgtgagatacttcctcttagaatgctttttctaattcatacagtaggcttaaatatgtcatggttttagagttttccttaaggaatacgttgattcccaggcacattacagtctgaatcagtcttaagaaattccaggatagaggtggaagaagttttagtaaattgttgtgcagcatggtgaccgcagttaataataatgtttatatatttcaaaattgctgaaagaggagatttcaaatgttctcaccacacccacacacaaaaaaaaatgataagtaggtgaggtgatggatatattaactagcttaatttaatttttctcaaaatatcacattatacttcataaatacattcaattattattagtcaattgcaaaaaaaaaaaaaaaaaa

SEQ ID NO: 2999 - DNA, 1455 bp, Homo sapiens
ggcacgagctcgtcccggggaagagactaaataacagagcccctctaggagaagccacgggatcccggcggcaaggagaacagaacactgaagactctagaaaagcaaagccggatttctggaaagtgcagaattcttttggttctttggttccagagagagagaagatgcttgtgccaggtggcaccagagtttgccaattgatccttcttattctgtgtgtacatgcaaagattggaccatgttacatgaaatagtgccagctggaggttctttgccagcaccatgccaagtgaaataatatatttactctctctattatacaccagtgtgtgcctgcagcagcctccacagccacgatgggtttgtttctgttttcttgggtggggagcagggacgggcggagggaggagagcaggtttcagatccttacttgccgagccgtttgtttaggtagagaagacaagtccaaagagtgtgtgggctttcctgtttctaaactttcgccactataaaaccaaaaaaaggaattgagatttcaccaaccccagtgcccagaagagggaaggggagtggctggagggagcagggggtgggacagtgtatcaaataagcagtatttaatcacctctggcgggggcctcgtgcaaggggagactgacaccaagaacagccagtagttcttctcccctgcactctgctccctgcgcggtaaccccaccactcctgaagcctgcccagtctccttccttccctgcttggtgagtcgcgcatctccgtggttatcccgctgtctcctctccaagaacaagcagagcccgggccactggcccttgcccaaggcagggaagaaggatgtgtgtgtccaggaaggaaaaaaaggtggatcagtgatttacttgaaaacaagctccatcccttttctatatttataagaagagaagatcttgagtgaagcagcacgcgacccaggcgtgtgtgaattgaatggagacgcttcttttctctttctttaatttttgtttttgttctttttttctttaaggaaagttttattttactgttcattttactttcttggtaacaaaaactaaaataaggaatagaaaagctgtttttcaggctgacagtccaattaagggtagccaagaccttgcatggtagagtaggaatcatagtgtcagtgaggtcccgtgagtctttgtgagtccttgtgtcatcgttcgggcactgtttttttatgcaagggcaaaaatctttgtatctggggaaaaaaaacttttttttaaattaaaaaggaaaataaaagatattgaggtcttcctagtgttacttaaattaagatcaaggtaagaaacattgtaaaaaaaaattacaaaagtgctatttgtttcctaaaaacagtgatttctattaaaaaggtgtcagaactggagaaaaaaaaaaaaaaaaaaa

SEQ ID NO: 3000 - DNA, 743 bp, Homo sapiens
  misc_feature (718)..(718): n equals a,t,g, or c
gtcctgawcaccgcactcctcatcgtcctcacctaccctgcctggaccttcatcgactgcctggactcggccagccccctcttccccgtgtgtgtcatagttgtgccattcttcctgtgttacaattaccctgtttctgattactacagcccaacccgggcggacaccaccaccattctggctgccggggctggagtgaccataggattctggatcaaccatttcttccagcttgtatccaagcccgctgaatctctccctgttattcagaacatcccaccactcaccacctacatgttagttttgggtctgaccaaatttgcagtgggaattgtgttgatcctcttggttcgtcagcttgtacaaaatctctcactgcaagtattatactcatggttcaaggtggtcaccaggaacaaggaggccaggcggagactggagattgaagtgccttacaagtttgttacctacacatctgttggcatctgcgctacaacctttgtgccgatgcttcacaggtttctgggattamcctgagtctcaaacagttggaaactagcccactggacatgaaagccaagacataggaaagttattggtaggcaaatcttgacaacttatttttctttaacaacaacaaaaagtcatacggctgtcttgctactaccagataaatgatgctgctgtgtgaaaggaaaaaaaaaaaaaaaaaaactcnagggggggccggtaacaaattcccc

SEQ ID NO: 3001 - DNA, 715 bp, Homo sapiens
gccccttttatttgcttcattgtgcaatggtataatttttatgcttttctattttcctgctttaaagagcttttaaagtttctgaggctctgccaaggtgttattacatttaaccctttgtccctgctttcttttctggtcctgaggtctcctattggtgtcacaggcaggtgctttgcatgccaactctgatttatccctgatgggcccttatgacgatatgaggcaacagttggtttgacttagcctgtggcagaggcagctgcacacatgtgggagggatatgaacttctgagaaaagagaaaatcccatgttgtacccgactctaataggccaggaacgagctttgccattggaatgtggcagtcctgcctctgcaggtttgttttgctgatagaaggtctggaacctggggcgctccctgcattccctggctctcccagcagtaggcatgggctgacggtgtcccatgtggaaggccttggctctctcatgaagtgtggcctgtaatcagcctcagcggcaagcctttactgttctctggttttgtccggattctcttttgtcgtctacaccctgacccatgccctcccaggccctggctggggctgtactccagagcaataggcttcccagaatctccagtctcacttccatagcaccagtggaggcttctgctgccacaccctgtctggaggcactgacctccctcga

SEQ ID NO: 3002 - DNA, 1040 bp, Homo sapiens
gtgattgtctctttctgttttgagttttgtttgcgtgtatcatttttgttctacattttgggaggggaaacattttccgttaaggaaggttgttgccagtggatttgactccaagggactagagtgtcgtggtgggggtggggaggggctgcagggtgatcattggctactgagcctccacaragagcatgtggtgccctgcctttgggagggtattttgctctcgttagttttgtgggcagcctcagattccctgttgagttgctgttaagaaatggagatttctggctctcattgggtaaggttttctgagttttatatcttattagatcacatccctttacccagaacaaatgcttcactgtcttctgattggcagtactcctgtggctttgtgccttgactcattttgttgtcttcagccttgaaggccccttcccacatggactgacatccactcatgtgcctgatccctgaagcctcccagcacccattcagttgcatccccagggcacaggactttgatctcttctgttgccctcgctaggttctccctggtgggttagtgctttgtatctgtctctctgcccctcactaattctacacccatgagaattagacattattctccttaaatatataaggaccatataatctgtatctttttggtgtgtgtatatggtatctggcacatggatctctgattaccagcctgacaycaacaaatcccctcagttacaacgtataggttaaacaaagcttttaaaagctcatgtggtatgacctcaaggttgctaacctggtcactcatggtaattagaaactctgattggcagctttgtatttcttgactaaaaacctaaataaactgattaggttttaggcgttctttcaaagaggttcttgagaagattgagaactatcctatttggtgcttagtgaaaagattttgaattactgtacgtaccagttgttgccatttctttattaaattcagaagtttttttgccaaaaaaaaaaaaaaaaaaaaaactcgagcc

SEQ ID NO: 3003 - DNA, 3511 bp, Homo sapiens
  misc_feature (779)..(779): n equals a,t,g, or c
caccaagtgctcctccacccctgataacttgagccggactcagtcaggctccagccttgccttggcctctgcggcgacgacagaacccgagagcgttcattccgggggcacaccctctcagcgagtggaatcgatggaagccctgcccatactgagccgtaacccaagcaggagcacagaccgagactgggagaccgcgtcgscgrcatcttccctggcctcagtggccgagtacacaggtcccaagctctttaaggagcccagtagtaaatcaaacaagccgattattcacaatgccatatcccattgctgcctggctggaaaagtgaacgaaccccacaagaattccatattggaggagctggagaagtgtgatgccaatcactacatcatactgtttcgtgatgctggctgccagttcagggcgctttactgctactatcctgatactgaggaaatctacaaactcactggcacggggccaaagaacatcaccaagaaaatgatcgacaaactgtataaatacagctcagaccgaaaacagtttaacttgatcccagccaaaaccatgtctgtcagtgtggacgcactcacaatccacaaccacctgtggcagcccaagcggcctgcagtgccaaagaaggcccagactcgtaaatgaccccggtgcagctggcgtccaaagggtgacccagactcgtaaatgatgcccttgtggctggcatccagagggtgccacggggtccttatttattgttttcatctatttgggtacgaantgtgcaaagtcacagaccttttgcaaagaggtttctagacagcagaagaaaacccctctctcagcgctcatctcacgcagaggatgccaggcagggtgaggatgggggagtagatgccgcttttgcagtggctcgcactgctgtggccactgctgaccactgaggctcccagcggagggtgttcacagccaggtcccgggccacggagctcccttacttgaagttctccttcagcatagattagacgtgatccactttgctttcttgcttctcacctcgcccccttgcacattgcctgacaccctcatattggccagctgtaatctcgtgactatgggactgaggctcaatcttggcttggggtgtttgaatgtctatagcaaaggaattcataatgggaaatctttttcatttgagaaattgtatgatatttattggttgtgtctactgccaacatttatatccaattctaagatttctgaaaaaaaattcttatcccttgctgctcagaaaaagtttacggaaaacaccagttcactaaaagcaccgaaatctgcaaagcctgtcttccgctagaacaacgtctacaaatgtgaagatgatgacttctggcacgcggtcatgagggtggggaatggcactaggagctgatgtttgcctcatttaaagtaggcaagccgagccaactgcagccatcattcattaagttttgggtagtgctctaatggtttgttcactttaataaagacagattttggtaaagtagaatatttttcattctgagcatgtttgtcccaaaaggtgatgcacttaagctgacagtcccttcagtggttttgttaggtcacggcttgtcctgtctggattctgcatctggaagcgctgcatgctctcagaggagcgtgccgtttcccctgtagatggatacttttgttttgttgcctatttaaaaacaattaagtggttatttgcagttatttcagaactccaagtaagtggatggctttgggttctttctgccttggtcccaatggtgttgatgcttctgtggagcgcggacattcccaggagcaggtgcgtgccagccatgctgccagacactgctgcaactgaccagctgccggaagattctggagccactaacattagttttgcacatattttcttgggagtgttacttgaatctatctcaaactgcagaaaaaatcaaaagatcaataattgggagaaaaagagacaaatttaactgttacataattttagatagacaaaaaacatgagtgagtcgtgtacataaggagggaacatggtacagaaggctagaaggaattataggtcttattcccctttcctcagtcctttgaagagaagtacagtctcttgcgattttgtatatatcgtgttcgacacagccgctctctgtcctgtaaatagggaactaaaggctgtatgatttctcaagtgctgagttacacagtcctgagtgagctttctgttaccatactttcacacgtgggctttatttctcactgtatgtttgatatgatattactgtatttattttaagaaagcactaagatgtaataaagtgatgaactaatttgctttacattgaatcgtatgtgtgaggttgctgtggctcatttcgctgaccaggcgacaccaactccttgctttataggagtttcacattgttctttaccatggccctatcgaagtcagtggaattggattctttttaatgaagagctagaaaatatctggcatagagctggaaaattgcattcccatgggacgtctgaatcaattctggattttctccatggaatgagtcagtgtgtggaacatcctgaaacttgtccttaagcgtgtagttttcactgttcgttgcgagtaagcactaatgtggcatggacattcctgatgtcccaagtccccaggccagtgttcgcctaatgattgacagaagcgtccckgcgttcttcakgcttggacacagcaacccttttaattagtcttgaaaagtttcagacacaggattaattttcgtggtggtgcttttgggcctttctggcttgggtggtggtaaagtcatgattttgcagttgataacactgacttataactctgtttatcaatgtctcctatattcaaagcccctgcagtggtatttgtgtctcgttgcaaatttctttcagcggaaagcttgcacaactttcgttgtgtctcagaattctaaccttgttatttaagacaagctgctctacccatttaggatataactttgtaaagaaagtgtaaacccaaakgattcaatgtatggatgaagtttatgtgtaaatccttggtaatgctagaawtctgggagccccagaagggttgaaagagaaatgaaacttgcgtgagtcccattattttacgcatgtatgtgcagatacgttctacccacacgtgtgcgtgcacatggctgtgtgcgtgcaccaaagatggactgctttccatgtgtccttttgactttctgcacgtgtcacgcggtgcagtctcttagcagacttcaggcccaaactgtattcttcactcaggcaaaattgaaaagtggaataattctaaattacttctaggttatacttttacctccctgaaattgtagttgtcacttggagggcaaaatatttattgaaataaaattttctgttaaaaattcaaaaaaaaaaaaaaaaaaaaaaaaattc

SEQ ID NO: 3004 - DNA, 2058 bp, Homo sapiens
caggaattcggcacgaggtccctttggagtctgttaagcccagcagcctgccgcctctcattgtgtatgaccggaatggattcagaattctgctccacttctcccagacgggagcccctgggcacccagaggtacaggtgctgctcttgaccatgatgagcccggctccccagcctgtctgggatatcatgtttcaagtggctgtgccaaagtcaatgagagtgaagctgcagccggcatccagctccaagcttcctgcattcagtcctttgatgcctccagctgtgatatctcagatgctgctgcttgacaatccacacaaagaacctatccgcttacggtacaagctgacattcaaccaaggtggacagcctttcagcgaagtaggagaagtgaaagacttcccagacctggctgtcttgggcgcagcctaacttttcacaagatggacccttcatttcaagcttaggctggcgttacttttgctgtctagtcaggactaatcacggtgtttcagtgcggagtgccaagagtcctatcctgacgtcaggctctgggtgtcaacctctgacttattctgcagatgctctgtgtgtgtgtgtgtgtgtgtgtgttcggggagagggtggtagcacagggcttgggatatcggcagtgtgggaaatgcgaagcatttctcatcatcatcatctctgctacagtcatgtttctgcatgtcagcgagcgacactgtccctgcctcaggttggaggttttatcagccaaagtgtttttttcatgtatcgttcgttccattcatccactctgtgccttgtcagcctttgaaaggcttggttgctcccaggctgctgttctcagggaccttaaaagggacctggttagtcttggggcagagagtatctacttgggcactctcttccaagaaagaccttgtctccattttcattagacaatgcttcttgtgtgtgttctggaagatcttctaaatggaatgcttgttgcactgttcccaggcgagtggctgccatgagacctgaggaccacacttgggggaccaatcatgtccttcaccactgtgccttagaatcgcccctggacagagttcctgggcagaggggaaagcagctcccaggccttactcaggcctcaggtccatgggttgggcagccagtctgggcccttctcaggatcctcatctccatcctcatcctcttccttcacagcatttacttggagctccttgtgacacaccatgtcagtcatgatgaatcggccaacagccagcccttgccagctgacgtcacagtctaagatgggaaactgtggtacagatagacatgaagagagcttagcagtgattgaggtggtgactaaatatacagtcattgaataaataccatgtagcaagtgtactttgtggagtgttgagtaagtggaaaatggaaagccagttgcatttagagatgataggcctaaagggaactgtcttctgtcgagaagtaaaggaaacttcatgaaggatgtagaagcttagctgcctcagagaagagagaccctgaagatctgaggcaagctggacaggagaggtggatatttgttgatggaagaattcaagtttataatcaattcccacttagcacctactgtgtgctaggaacttgaatgtgtatgtttgacaagtcctgcttggcctgatgggtgggagaaggaacctgagcctggctgagatggctaggcggagggctttgaagtccaagcagctgaactggctgggtgggtttctacctttgaaactgcaagacttgtttggagctcttaattacaatatctgatatttttacagtctgatcttttgacttctacatatagtggaaatctgccaatactaattggtggagatgggaactgtaaaagatcaagtatgctaattttaagcaaatgtaaaaactcataaaacaggtaaacagtggggtgatttcatttgccataattcacataagacgaattttaatctaaaagtactttcttgcttgtaaaaaaaaaaaaaaaaaaaaaaaa

SEQ ID NO: 3005 - DNA, 840 bp, Homo sapiens
aattcggcacgagttggctgcggctggtcatcttcccacctccacagtgggccgagctgccaaacaaggggtacacatgtgccccctgacataggccaggtggtctctgccctctgtagctcccatgagagagggctcctcggaccgaaacaggaggccactgcccttgcgcacacaccgtggccgggtcctcctgggcggagcgctttccgtgtgtgggaaagtcaagggcagccccgagcctcgaagcccaggctcccagccccgcgccatgttgcattcccgcctctactccttggtaggctggttgctttgagtggttctttttaattctttctgttggtttctccttttcctttgcctgggttttgctttaacctctctgttgcagagatgcagagcactcagagagcctatttctatcatcgctttcctattctccacctagaaccaggtgactggccgcccgagtggtgtctcttgtgtgtgtggtgcgtccaaagctgtgcaagaaatgcttctgcctaggttttctcgcgccccccccttgccttggcttttcctgcctgcttacacccccgtttccctgatctgcccctgggcttctgggcaggttccccgcactgtgcctatcgccgggcctgtaagtaagcaaactgggcaaatgaggggctgtgtctggaatttggagacgtcacatttaaatcttaaaacactgtaatcccagcaatctgggaggctgaggcgggaggattgcttgagtccaggagtttgagaccattctgggcaacatagggagaccctcatctctacaaaaaaattaaaaaaaaaaaaaaaaac

SEQ ID NO: 3006 - DNA, 2387 bp, Homo sapiens
agatggcggcgctgaggggtcttgggggctctaggccggccacctactggtttgcagcggagacgacgcatggggcctgcgcaataggagtacgctgcctgggaggcgtgactagaagcggaagtagttgtgggcgcctttgcaaccgcctgggacgccgccgagtggtctktgcaggttcgcgggtcgctggcgggggtcgtgagggagtgcgccgggagcggagatatggagggagatggttcagacccagagcctccagatgccggggaggacagcaagtccgagaatggggagaatgcgcccatctactgcatctgccgcaaaccggacatcaactgcttcatgatcgggtgtgacaactgcaatgagtggttccatggggactgcatccggatcactgagaagatggccaaggccatccgggagtggtactgtcgggagtgcagagagaaagaccccaagctagagattcgctatcggcacaagaagtcacgggagcgggatggcaatgagcgggacagcagtgagccccgggatgagggtggagggcgcaagaggcctgtccctgatccagacctgcagcgccgggcagggtcagggacaggggttggggccatgcttgctcggggctctgcttcgccccacaaatcctctccgcagcccttggtggccacacccagccagcatcaccagcagcagcagcagcagatcaaacggtcagcccgcatgtgtggtgagtgtgaggcatgtcggcgcactgaggactgtggtcactgtgatttctgtcgggacatgaagaagttcgggggccccaacaagatccggcagaagtgccggctgcgccagtgccagctgcgggcccgggaatcgtacaagtacttcccttcctcgctctcaccagtgacgccctcagagtccctgccaaggccccgccggccactgcccacccaacagcagccacagccatcacagaagttagggcgcatccgtgaagatgagggggcagtggcgtcatcaacagtcaaggagcctcctgaggctacagccacacctgagccactctcagatgaggacctacctctggatcctgacctgtatcaggacttctgtgcaggggcctttgatgaccatggcctgccctggatgagcgacacagaagagtccccattcctggaccccgcgctgcggaagagggcagtgaaagtgaagcatgtgaagcgtcgggagaagaagtctgagaagaagaaggaggagcgatacaagcggcatcggcagaagcagaagcacaaggataaatggaaacacccagagagggctgatgccaaggaccctgcgtcactgccccagtgcctggggcccggctgtgtgcgccccgcccagcccagctccaagtattgctcagatgactgtggcatgaagctggcagccaaccgcatctacgagatcctcccccagcgcatccagcagtggcagcagagcccttgcattgctgaagagcacggcaagaagctgctcgaacgcattcgccgagagcagcagartgcccgcactcgccttcaggaaatggaacgccgattccatgagcttgaggccatcattctacgtgccaagcarcaggctgtgcscsaggwtraggagtatgagaagccagacgtcctttgggtccatgtaccccacacgcattgaaggggccacacgactcttctgtgatgtgtataatcctcagagcaaaacatactgtaagcggctccaggtgctgtgccccgagcactcacgggaccccaaagtgccagctgacgaggtatgcgggtgcccccttgtacgtgatgtctttgagctcacgggtgacttctgccgcctgcccaagcgccagtgcaatcgccattactgctgggagaagctgcggcgtgcggaagtggacttggagcgcgtgcgtgtgtggtacaagctggacgagctgtttgagcaggagcgcaatgtgcgcacagccatgacaaaccgcgcgggattgctggccctgatgctgcaccagacgatccagcacgatcccctcactaccgacctgcgctccagtgccgaccgctgagcctcctggcccggaccccttacaccctgcattccagatgggggagccgcccggtgcccgtgtgtccgttcctccactcatctgtttctccggttctccctgtgcccatccaccggttgaccgcccatctgcctttatcagagggactgtccccgtcgacatgttcagtgcctggtggggctgcggagtccactcatccttgcctcctctccctgggttttgttaataaaattttgaagaaaccaaaaaaaaaaaaaaaaaaaaaaaaaaaaaaaaaaaaaaaaaaaaaaaaaaaaaa

SEQ ID NO: 3007 - DNA, 2064 bp, Homo sapiens
  misc_feature (1596)..(1596): n equals a,t,g, or c
  misc_feature (2005)..(2005): n equals a,t,g, or c
  misc_feature (2047)..(2047): n equals a,t,g, or c
  misc_feature (2057)..(2057): n equals a,t,g, or c
ccggagggccgctggtgtctgtgtacagggcgtgctgtctgtggaaacgcgagggcacactagcactttcctactgcstctgtcaccgggtccctccacccttgtctcctgtgcggccagcgtcagagccatggcgacggaggagaagaagcctgagaccgaggccgccagagcacagccaaccccttcgtcatccgccactcagagcaagcctacacctgtgaagccaaactatgctctaaagttcacccttgctggccacaccaaagcagtgtcctccgtgaaattcagcccgaatggagagtggctggcaagttcatctgctgataaacttattaaaatttggggcgcgtatgatgggaaatttgagaaaaccatatctggtcacaagctgggaatatccgatgtagcctggtcgtcagattctaaccttcttgtttctgcctcagatgacaaaaccttgaagatatgggacgtgagctcgggcaagtgtctgaaaaccctgaagggacacagtaattatgtcttttgctgcaacttcaatccccagtccaaccttattgtctcaggatcctttgacgaaagcgtgaggatatgggatgtgaaaacagggaagtgcctcaagactttgccagctcactcggatccagtctcggccgttcattttaatcgtgatggatccttgatagtttcaagtagctatgatggtctctgtcgcatctgggacaccgcctcaggccagtgcctgaagacgctcatcgatgacgacaacccccccgtgtcttttgtgaagttctccccgaacggcaaatacatcctggccgccacgctggacaacactctgaagctctgggactacagcaaggggaagtgcctgaagacgtacactggccacaagaatgagaaatactgcatatttgccaatttctctgttactggtgggaagtggattgtgtctggctcagaggataaccttgtttacatctggaaccttcagacgaaagagattgtacagaaactacaaggccacacagatgtcgtgatctcaacagcttgtcacccaacagaaaacatcatcgcctctgctgcgctagaaaatgacaaaacaattaaactgtggaagagtgactgctaagtccctttgctcctgcccgcgagagactgtcgggaagtygacccggattggcaagaaacagggtgtcttggaggtggtcccccagatctgcgcctgggggtcaggacagggcctgatttgagcctcctctctgaagatgatttggccgagcggaaggtgtggaccaccggaaagttcttaaaagttgctggtgacatttcttgccaattctaacactgtctagggaagagttcctagtctattgtgttcaaacagagtcaacaaaagtttttaattttttattacagaagggtgaagttcaatttaacatgcgttgtgttttttcagtaaacgttctgtatctttttgatattccatgacccagtgcacgctgtggcctgtcaccgccaccgtggccccgccagctggcctcccctttggcccacgccggccgcccccattctctgctgcgtagatgcccnggcccagggccctgactcctccattcccgccagtagctgttcctagtgtattttcgtctttctggaaaacagcattgagtggttgttttctgtgtaaagagccgtttgtgtcttgggagtttgtggcccacatgccgatagcacggtcatcgcacatgactctcccgtttgtctcagtgtccctgcaacaagcagcaccgcagactgtaataaaaggtggggttttgtgaatggttgtggcaagtgcgtccttgtgaagctcgtctccatgtggctttcttggagaaaggctcccctggggcaagagggtggaaggtttctttggacaggaggtgctgargctggctgcamctgctctctgaagacgccttcctytctaggttcattgttaatgttgctggrgccgggnaacggggttgggaagttcttaatttcccaaggagccagcccngatggacttnccttgga

SEQ ID NO: 3008 - DNA, 1127 bp, Homo sapiens
gctgcactccagcctgggcgasgagwgatattgkcactgtctsccccttgctaacctcctaggtgcttaggataaaacgtcaaatatttaacatggcttcacagacatcttgkatcatttggcccctggctaccttacctcacccaatttcctcctttgctctgtactctagctacactgkccgaggagttcctaaaacatcacgctgggtccgaccacaggatcttcacatgtgctgctccctctatctgcatcgctctttcctcttctcttgtttgcttaactcctacttaccctcgggcttaatcagcactttctcacctctcctagtctgttgctcttatttaagatcaaacagcagagaaatgtgaagtccactgacttccgggtggaacagggttcagtatgccaattaaattattgggtgctggctgggcacggtggctcacacctgtaatcccagcactttggaagggcaaggcggytagatcacttgaggtccaggagtttgagaggacaacatgatgaaactccatctctactaaaaatacaataattagccaggcgtggtggcktgmwcctgtattcccagctactcaggagactgaagcaggaggatcacttgaacctgggaggcagaggctgcagtcagccgagattgcatcactgagctctagcctgggggacagagtgagactctgtctcaaaaaaaaaaaaaaaaagttatatctaatgtgctcagaagttaacaatagaccaaaatttcatcaaggctgtgtgtgagggtattatctagttacagattacagaggcttggctgggcatggtgacttaacacctataatttcagcactttgggaggcccaggcaggaggatcgcttgagcccaggagttcaagaccagcctgggcatcacagcaacaccttgtctctgcaaaaaataaaaataaaaaattaactgggtgtggtggcatgcgcctgtagtctcagctactcaggaggctgaggtgggaggagtgcctgaacccgggagttcaaggcagcagtgacctatgatcgagcccctgcactccagcctgggcaaccaagcgagaccctgtctctaaaaaaaaaaaaaaaaaactcga

SEQ ID NO: 3009 - DNA, 772 bp, Homo sapiens
ggcacgagcacaagccgcggagtgtcagtggccactgcaggggatgtgcctcttgtggtcttggctctgggtccagcctaccttaaggtgtgtatttatcttccactataaaaactacaaacagctatttatttccaggcaagagttttaagaagaaccaaaatgcccccaaatctcactccactattgacggtttaaaaagtgaccacgtacgtgtggtgaaaaggttacaatagtgccagaaaaagcagcgtctgagcacccagggtcccatgcgccctgcttccctcgaaggtcactcttagcagctggtgcacatttccagagcacagctgggcctctccacaggcgcacctcagaggacctgcagccgtggttccagaccactacggtagagatacggcaataaagcgagtcacacaaatttcgtggtttcccagtgcatatggaagttatgtttacaggctgggcaccgtggctcccacctgtaatcccagcactttaggaggctgaggcaggcagatctcttgaggtcaggagttcgagaccagcttggccaacatggtgaaaccccatctctactaaaaatacaaaaaaattagctgggcgtggtggcgcacgcctgtagtcccagctgctcagggggctgaggcaggagaatcacttgaacccgggagacggaggttgcagtgagccgagattgcgccactgcattccagcctgggaaacagcccgagactccgtctcaaaaaaaaaaaaaaaaaaaaaaaaa

SEQ ID NO: 3010 - DNA, 1014 bp, Homo sapiens
ggtttaacataaatcaaatagttccaatgggttgcttcatatttgtgtgtactttaaagtcatgccagcttaaatgactgtgaggtacaatgtgttgactttgagttttgtaaattgataatttgttgctatgaaagttgtccatggtataactcatcactttttgaaggtacttagtatgtctgatactggcaagctgtcatgaaaaaattgatgcccagggaattccggggttttgctttcagatgtttgacatgtagatatttaattcttcttaagatttccctggacattgtcagtgtaaggtgtactgatctttaaacacaaactttagtttgggctcctgtttctcagcattctttgggataataatctgaatggtgtattctcaagttttttttttttttttttttttaagtgtatgaatcaccttggggatcttgttaaaaggcaggctatgatccagtgggtctgggatgagtcttgggattctacattttcgcaagctcccagataatgccagtgctgctggtccacagacagtactttaagcagcaagacaacactttgatggacaaagtggtgctgtgcaacacccatcacatacaaattaccagttgctttcctcattgtgttttggtgcatctaaagctaagatgatctggtgtatattcttgactcttgggtatccctgtgagcattaatgaatagtttaacaaccgaccatttggtctagcatgtatggagactaccaagacaggcttattgtgttggaagaagtgatgcttatgtttttagactcttatggaatataccaattcctgtatgttagccaaggttcttgctgcaaacagaagtgaatacaacaaactgctaacttgaaaagatgctgatagaggggttagaaaggcatagtgctgaatcaaatgtatttattttaactagctctgttcatgatggctggttaatttgggcaaaaagatttattgatgaatcatggagaaaaagtgggaa

SEQ ID NO: 3011 - DNA, 1642 bp, Homo sapiens
  misc_feature (5)..(5): n equals a,t,g, or c
  misc_feature (957)..(957): n equals a,t,g, or c
  misc_feature (1578)..(1578): n equals a,t,g, or c
gaganagagagaactagtctcgagcacattctctgcccttggcctgacgtattctcccttatcagcacataccacaagtctttcaagacctataaaatcagtaccattttctctgggaagtcatcctgattcccctctttctgcgtatggtgaagaatgctttatggaatactctgcattcctttctctcaagacttagatttaccattaccatatggaaatttctaggctgtttccaatgcctaggtggtgctcagaagtgttagtggtttagtagaatcctaattgtggagaaagacagccaaatttgggaggtttttagcatagagtaaccctggcattcagggatgtttgctgtgcaagatgggtgtggtaccagaggagctgttcctggaggaactgaatctcagtggcttgaagtggtcagttccggcattggtatgttccccttctgtattgcacagagctgggaaaccactgaagtcatgtgctctgcagaacttgttcaactggtttcctctccacagacccctaattcagatttccacccttattcttttctgcatatgctcttagtctgggcttgttttaaggtttaccacagtagagttctcagtatagttatttatttgtcttgctgagtgtagagtgggtagggccaagtatgtactccctttgaaaagtgttatcagtaagacaagatagacaggtattatgtaaatcatggagtgtcagactccattagcaggtttatttctgtggatctaaccatttcacccccacactcatgtgtacatacacatatacatagctatcattatttagagcctactactagttgctgggtgaggtgtcagagccccggcattggaaagtagtcaactcacaggttggtaggaagaatttactgacagcagtataggtttgaaaaaggaaagttttattagaaagaagganctctgcagaagaatgcctcagcaagagagaactgagctcgcggtggattttccttagrgtatttatggaacttaaagcaggagcttaagggtagtttggsccrtattagccaataggycatgataaatgattacatttttagacgtaatgtcagcaagggttgcacagggagtttcggcatggcattccagagatgtatagaaagtctagttgcttacaaattttaggttgaaaagagagctggaaccaggtgccgattttagataacagggaagttaattacttctaaattcctcagataagaagttttgcctctgaatggtctccttagtggactccaggtgatcactagtatttggtatgtatcatctcatttaatccttacaacaaccttatgaagtttggtgtgttgctaatcctgctttatatatgggaaatggaagctcagagaagttagcgggtaacatgtcattcttggtttttcttatgtccttccctcttatctcagggaggaagtggggtatattcctttctgtagctggctgccgcctctgctcttcagaaccttgctttcttttgttcttattcctgtatctttagcccctccttcacgtgttcttntcttgcagactataaaaatatgctttttccacaatcatttaaaaaaaaaaaaaaaaaactcgag

SEQ ID NO: 3012 - DNA, 1534 bp, Homo sapiens
ccacgcgtccgcggacgctggacctttgccatcttcaacatagtcacacccaaaccagattccttggtgccagcttagatccctcactgtatttcatacctaatgcattaccataccctgctaattttatcttttaaatcttgcgtttctcctctccagtctgggcgacagagcaagactccctttccaaaaacaagcaaatgaaaaaatagagttttctctatcacacaaatgggaaggtttgtattgaatgttatatttatcctctatccagtcttgtcttgggagcacaaagcaaaaaggcccagcatcctccactatcttctgaaaacttgccctcaggcctgagcaagagggctgcccggttgcttccatgtagccagccagcatatgtgcagggccaagtctagagggaggagggggtggcacatgggatggtttcgtttaattggaagacagtgggtagatttggagctgggcatttgaaagatgttgagagttgtggatcatgggcaagaaaagcgctgttctgggactgcggggcaggaaaaggaaactgatgcttctgagggtgagtctgatgagataacatgcctgtgtgtgggcctcaggttagacagtgctkaggtctcccgtcactgggcatccagctgggtctacggccgtggctcctgccttctgcarccctgtcagggcccaaggccttccccatcagcacttgctccagcctactcactggaakttgtgttctgggtgggkgtgtagaatactcgmactcytacttggggcatmagggagctytytagcaatttcttctgcacctagggagagcccactgtaaaaaaggcctagycaaatcctcaggkgtacatggacatcaagattgggaacaagcggttggctgatcaaacctcctggttccgacgtsgtgcccatgaccacagagaattttctctacatgtgcacccatttaaaggactcggcttcaagggaagcagcttccaccgcattatcccccagttcatttgccagggcaggatttcacaaaccacggtggcaccaggggtctgcgcaggcatggcactaagtgtcccatggcacatttggccctcatggaggcctcaaaagggcaggaccagcaccctcttctacggaggaaggaacgggcacagcagggtgagccactgcgcctgatcaaggcatcaccgttgaacctcctaagaggaaaacataaggctgtgcaataccaggaactgggattctagaaacaaggagagtcagcaattaccagccagccaaggtcctggaagctgacgtagagctcgtgccgacggcagacctgccggccgtgggagccgcggacgtcatctgtcagggacagaaggggcaaggtcttttctggggttcctgctgtgtgcagctactatggggtaccagggtgggggatgccctgatgagcacatttgtcaaataaatgaatgacaggaaaccaaaaaaaaaaaaaaaaaaaaaaaaaaaaaaaaaaaaaaaaaaa

SEQ ID NO: 3013 - DNA, 857 bp, Homo sapiens
gcccacgcgtccggtataaatttagcattaccagtggattctgcgtattttatatgctctttttattttggttttgtcagtttgctactcgtgagtttatctttgaacagcttcccatggctatgggattaggtctgtactccagagcctgatatctatgggcctttttttcttagcctttctagtctttttaccccatatttcttcatgatatccataktttatccaacctaaacaaagagctagtccccaagcacactaacccgttacattcatccctctgcttttaatacaattgttcctctatagagaatacctttaaaaatatatataagttggctaagctcaaaaacaccacttctatgataatactcttacagattcttccatttgtaaatatgcatgctcatagtactcttacagcgttggtcctctcttataacawtgttaragtagatactgtaaactgaaaagtgacacataaaaatacataatggtgcagctcaggtatgtgtcatcttaatattcctattaaccttagaactttgtgactgtgttgggattacttgacatatttgtttatcaatcamcmcagtgacagtgacgacgawtkagtaaccagtgttttgtttttgaaacatttgaagaagtgttccatatttctgaagttattagtttagtttagtttagtttagtttagtttagtttagtttagtttagtttagtttagtttagtttagttttaacgacagagtcttgctctgttgcccaggctggaggttgcagtgagccgaggtcacgccattccactccagcctgggcaacaatagcgaaactcagtctcctaaaaaaaaaac

SEQ ID NO: 3014 - DNA, 819 bp, Homo sapiens
  misc_feature (814)..(814): n equals a,t,g, or c
ccacgcgtccgagttacttcctggaggaagtggtgtttcctccacccataggtgccctgcccccatcctcatggtggcagcaaatcagcatgtgctggggagaccctggggtagcagccactgacctcacacctggaggaagctgtgtgaccgattcatgagcttatgcctgaagacagagcaagcactccccgcaccacgacgatgacgttcacttgttttgtgtttttcgatctcttcaacgccttgacctgccgctctcagaccaagctgatatttgagatcggctttctcaggaaccacatgttcctctactccgtcctggggtccatcctggggcagctggcggtcatttacatccccccgctgcagagggtcttccagacggagaacctgggagcgcttgatttgctgtttttaactggattggcctcatccgtcttcattttgtcagagctcctcaaactatgtgaaaaatactgttgcagccccaagagagtccagatgcaccctgaagatgtgtagtggaccgcactccgcggcaccttccctaatcatctcgatctggttgtgactgtggcccctgccgtgtctcctcgtcaggggagacttttaggaggccgcagccttccatcaccggatcagtttttcctcttaggaaagctgcaggaacctcgtgggctccagggacccaggcccacatccatccagcgttcccgctggctgtgggacagacagggaggggcctgtacagaaacaccacactgtttattaaatcacaatgatttttattaaaaaaaaaaaaaaaaaaaanaaaaa

SEQ ID NO: 3015 - DNA, 739 bp, Homo sapiens
cagcgcagaaggaccagcagaaagatgccgaggcggaagggctgagcggcacgaccctgctgccgaagctgattccctccggtgcaggccgggagtggctggagcggcgccgcgcgaccatccggccctggagcaccttcgtggaccagcagcgcttctcacggccccgcaacctgggagagctgtgccagcgcctcgtacgcaacgtggagtactaccagagcaactatgtgttcgtgttcctgggcctcatcctgtactgtgtggtgacgtcccctatgttgctggtggctctggctgtctttttcggcgcctgttacattctctatctgcgcaccttggagtccaagcttgtgctctttggccgagaggtgagcccagcgcatcagtatgctctggctggaggcatctccttccccttcttctggctggctggtgcgggctcggccgtcttctgggtgctgggagccaccctggtggtcatcggctcccacgctgccttccaccagattgaggctgtggacggggaggagctgcagatggaacccgtgtgaggtgtcttctgggacctgccggcctcccgggccagctgccccacccctgcccatgcctgtcctgcacggctctgctgctcgggcccacagcgccgtcccatcacaagcccggggagggatcccgcctttgaaaataaagctgttatgggtgtcattcaaaaaaaaaaaaaaaaaaaaaaaaaaaa

SEQ ID NO: 3016 - DNA, 1537 bp, Homo sapiens
ccacgcgtccgcggacggtggatgacaaaacaactaccgtgtgactgtgatcttcagagatgtccagcttgaaggtggctgcaactatgattatattgaagttttcgatggcccctaccgcagttcccctctcattgctcgagtttgtgatggggccagaggctccttcacttcttcctccaacttcatgtccattcgcttcatcagtgaccacagcatcacaagggagagggttccgggctgagtactactccagtccctccaatgacagcaccaacctgctctgtctgccaaatcacatgcaagccagtgtgagcaggagctatctccaatccttgggcttttctgccagtgaccttgtcatttccacctggaatggatactacgagtgtcggccccagataacgccgaacctggtgatattcacaattccctactcaggctgcggcaccttcaagcaggcagacaatgacaccatcgactattccaacttcctcacagcagctgtctcaggtggcatcatcaagaggaggacagacctccgtattcacgtcagctgcagaatgcttcagaacacctgggtcgacaccatgtacattgctaatgacaccatccacgttgctaataacaccatccaggtcgaggaagtccagtatggcaattttgacgtgaacatttccttttatacttcctcatctttcttgtatcctgtgaccagccgcccttactacgtggacctgaaccaggacttgtacgttcaggctgaaatcctccattctgatgctgtactgaccttgtttgtggacacctgcgtggcatcaccatactccaatgacttcacgtctttgacttatgatctaatccggagtggatgcgtgagggatgacacctacggaccctactcctcgccatctcttcgcattgcccgcttccggttcagggccttccacttcctgaaccgcttcccctccgtgtacctgcgttgtaaaatggtggtgtgcagagcgtatgaccctcttcccgctgctaccgaggctgtgtgttgaggtcgaagagggatgtgggctcctaccaggaaaaggtggacgtcgtcctgggtcccatccagctgcagacccccccacgccgagaagaggagcctcggtaggtggtcgctctcagaccccactgtccaccggggcgcagacccctgactcggggacttgggatgttcctcttggtgtcatattccaactcagattgagccctacattgtgctgcacctggtcatacggagttgaatcagacctggttcccgcctcccccaaggctcatggtccttggaggacccgttgcagggtgaggtcaagagagttctgacctggatggcccatagacctgacgtcccagaatccatgcttctcatctgcaaaatgaaaatgtcaatacttacttcttagcactgttgagagggttacttacataaaggaattttggtgaaactgccaaaaaaaaaaaaaaaaaaaaaaaaaaaaaaaaaaaaaaaaaaaaaaaaaaa

SEQ ID NO: 3017 - DNA, 2146 bp, Homo sapiens
  misc_feature (20)..(20): n equals a,t,g, or c
  misc_feature (38)..(38): n equals a,t,g, or c
  misc_feature (2125)..(2125): n equals a,t,g, or c
cgtgcccagcctattcatgnactcaactgggatctggncacactgcactgggtgttttgttctctgatgtgcacattgatgaatgcatattggtacaagggaaatgaatctgttttcagccatttaaaaaattgtgttgtaaaggcaaacaaaaatagcttgaacatttaaaaattactgtttaatattgtttgactgattttctaagaattatgtgaacaatgatgagtccagggcagcagccatcacaaatatgacagtccagcaaggcccatggaggtccctttggaagggacttgcacagctgattttctttttccagtgttgtttttacgggtgaaacgtggcttttgaaatactttagttgtttggcttagagctcccactttccccctaacatagtgcctgtctgttttttaaaacattttacccttcggcactattttctgctattcccattaatattatgtaacataaaccacttgctactgatttgggcatattacagactacaattactagttgctttgaatgcattggcactcttaattattgcaaaggagaattgaaaagtagtcttgtggtcctagttaatttagctttgggcaaactaagtggcttttcttctgtcctcttctcaaaaggccttttaagcagcagagactgggctaaatactggaactgaattccacttttctgcctgctcatttgctgccaaagaccacttggggctccttgtctagaatgctctaagacgaaatttggccagacacagggttccttgattgytctgttcaactaatagagaacytacattttgccttcttaatatcgactttcttttgtaccaggtttttctttctttcttttttgccttaggagcttagctcaaagttcagctaacctttgacactactagtgtcatttagtaacagtaatctttgacactactagtgtcatttaggagcttagctcaaagttcagctaacctttgacactgctagtgcgttcaagaaagggtagggaatgaagtacccttaatgcagggtcagcaaacttttcctgtaaaaggccagataggaagtatttttggctttttgggctgtttgcttttgctactactactgtgggaatgaccatggtcatggctgtgttccagcacaacttgatttaccaagacaagctgtgggctgtatttggtcctcaggctgtggcttgctagcccctgctctaatggattgtgttggcggcaatggcaagattcccttgctgagaacatgcagatgaataaccttatagctgggatgcagagaggagaaagttctgtaggtaataagtgcactgtattccctctgagctacttcctgggcatagttacatgtatggccagtgtgtgtacttgagccatcaggctcagacacttgttgaatatacctctcattgcattagtttgtaattgtgctagtgctgggtgctgagctcagctgcccggatgacctttccagactgaaggacatactcccctaacagctgggagtgctgctggctggccatttacttccagcccttatgaggagtttcccctgctgaagagccctgcctgccccagatcatacccccttcctgcctgtaacccttaccggctccatatggggtacaaagggctggcctcctcaccccaacttgggaaamcctctggggccatcccagctccagagccccttgtggggtcagtgagacctcattgtggccacattacagcccagtgcctctccctgacaagcctgtacccagccggctcagcccacagcactgtcctatgaaccttcctgcacgccattctccacctcagtatctgctttcggggaacccaacctgcgacagtgcttctgtgtgttttcagtcctgcaggtttgaactctgactttggagacttttccagttatctcgtggaatgacagattgtgcctgtatgatatcaggcacaattaatgcaaattaggcagacctatttattctagatgtgaatttgctatttattttaaatgttgattttatgtgttatgtgactctgaacttattgccaaataaaagtttgaattgtaaaaaaaaaaaaaaaaaaatntctcggtccgcaagggaattc

SEQ ID NO: 3018 - DNA, 1384 bp, Homo sapiens
gagcgtggataatccagaaaaggggaaaattgaaaattagtagtgttgtgtggaggaactgacactgaattagtgtggtctttttatgcattcggccattgttttgtcattgctcctcaattgtttccctactgctggacggaaaatttagattgtcttattcagaaaaccaaatgcctttctattgtctttccttattattattatttttcaaattaagttgatgtctcttttgtcaggcagttgaaaaatatgttttatgaggattgtgggttttgttagttcttaccacactgccacgccacactcagtttgagaaatacacacacgacaactccagactcatttcagaaatatttttatccatgtttacctctgcagctggtgcagatctcaggtgtgcaagaaatatttctttaaaaaaaaaaaaaccaaaaacaaaatgctgttttatttgtattttargacatttctgcctaagtcatctgggtarctcagaaatctctgttcactgcctgggataggtttatgcaattttaaatgttacataaatgaatgaaataaggtgaacatagtcattttttaaaaatagcattattatttttatgaaaaataaatagaatgctttggattcataaaaaggctatatttgcaaagtacttaactgggtatgacattggggaaaaatgtttaacattgatgataattctgctctcagatttgaaactgccttcagatttttgttctgctttagaggaacaaaaatggaaactcgggtgaattacgatgttgtttgtgaaaagacatgtctcaaaactctagctaatctgtccaaaaaaaaaaaaaaagcaacagtccccatactaaaaataccaatgaaacaaaaaagccccatttgatcttaaacatatatacatttagaagttttaagttaaatattaaggttatgtgtgcatttaaaaaattatcttactgattgactttaagaagttaacccaccaactactggttcttgtcttgacagggcttttatctacactgacaaaatgaaatactatgcaatcattaaacattctattttattttactctattttctcctattttatgatagcattttataatggtatatgaaggtgctcattatatgtggttcagtgagagagggtggctatagaatagaatgtactgtaccttcccatttttgtaaaaatatgtttagaacaaagacgaatacgatacatgttaatggtgggtagattatggctgatttttatgctctttatttttataattgtactattataaatgctttacttttgtaataaaaattaataaaagtcattttttaaagaaaaaaaaaaaaaaaaaaaaagggcggccgc

SEQ ID NO: 3019 - DNA, 1374 bp, Homo sapiens
ccacgcgtccgcttttagcaaagcttctttaccaagttttgattaaattgcaatataaaattaagttttttcacggtgctatattttgtggaatatgggtagcactcaggtttctttcttttttcttttctccttccttcttccttcattccttcattcctccctccccccgaacctccctccctctcttccttccctccttccttccttcctcaacctcgggcctcccaaaagttgctgggattacaaggccatgagccaccgtggcccggcctatatacccttattcttgattatttcttttttcatcttttcaatcctgcttacttttatcctcacttttctttctgccatgaaaactgcacctaatttaccacacttaagattggcaatttttgattcattgatgggagaagtacagtagaaaggccctgcagtttagaattaagttgtgtttgtttatttacatgtatgcccatttcttctaaattaaatctagaatgtgagactttgacatataaaagcatgataagtattttcttaaaaaataagactattgatacataatgaaaccaccattggtaattgaattttaaaatgatatgcaaaaatatttagaaatccagttgggaaatgtgtttttgcatatgtcaccagatacacattaggcagtactacaaatgttaattcttaaacaatactgtggtgatggcaatcagtaatttatttctttgtcctgtaacttatcattcttgtcttttgtaatgtcttacacagtattaacataactgtaccttttttttgttcttggtatccatacattttaagatggaaaatcagttcatagttgatatgatattgtatatgggcaaaatgtccgttaaactaaaattcagtaaaaaaggtaatataaactggcttgatttataaaagatgttttgtttggcagttatcagtcattataagcaattatcttcaaagacaaaaaaactggactaatttgttgccattctttatgggatgtttacaataaaattccaagttgtttggaatcaattgcactcttgctgctttatgccttaatttatgtaccagagaaaaattaaccagaagaaagaaatatggagttacctattcagctttagagattgtaacatgtaactcttaggtctttcttgtttctttgtcatagaatattttattactattactttttaatctgagaaactaggatgcttcttcctatcaaagaaaaggttttgttttttgttttcatcttagacattgcaaatattctttgggtcacttttaggataataaatatgatgtttacactttaaaaaaaaaaaaaaaaaaaaaaaaaaaaaaaaaaaa

SEQ ID NO: 3020 - DNA, 743 bp, Homo sapiens
  misc_feature (1)..(1): n equals a,t,g, or c
  misc_feature (5)..(5): n equals a,t,g, or c
  misc_feature (25)..(25): n equals a,t,g, or c
  misc_feature (41)..(41): n equals a,t,g, or c
  misc_feature (44)..(44): n equals a,t,g, or c
nattncgcccaaggctcctaaattnccgaccccacctatanggnaaagctggttaccccctgcaggtacccggtcccggaaattccccgggtcgaccccacgcgtccgaaatggtctaacatatatgaggacaatggtgatgatgctccacagaatgctaagaaagctaggcttctaccagaaggggaggagacgttggaatcagatgatgaaaaagatgagcatacttctaaaaagcgcaaagtagagccaggagaaccagcaaagaagaaaaagtagaaacaaatgaccagaatttctgtactgctaaacttgttgaaatgtttctttggacagattaagttgatattgtgggttattatgccacatctccatgaaaatgcatacgttaatgaactaataagtattgcctcaagaactttccactatagaattctttttttatttaaaacatgtatgtatttaaaactcaactggtgacttgtgattgtgaaattgataacacttggatgcattcttgctctcacagaattggtgacatgctttgagagttttgtcacatgttgacatgccaatgttcttataaaccttttataaaggaatatatttttaaagtaaatatattgtaatgtactgtgaacttgtagggtgcttttcaacagtctttgtacagtgtaaatagatcatggaaataaaattacttattcaatattaaaaaaaaaaaaaaaaaaaagggcggccgc

SEQ ID NO: 3021 - DNA, 736 bp, Homo sapiens
cccgggtcgacccacgcgtccggtgaaatcactgctccatatttgccagtggaggaaatgggcatagagtagagaatagcttcatatgtttacacgtttgcatagactacacacatgtcatgcgtttatggcaggtagctggtatttattccccaaagtaataatgttgaagtatgggtctcatcattcccatacacagaaacacaaaacactttgatcataaacttttttcttcagaagccaaactaacttgcagaataatagagccactggtttaatgtttcctcaagataggttttagtgtaagctagtattctgtgtgttcgtagaaatgattcaatacctgcagctggtgaattaggaattgtatttgttgccttttttatattagatgaggtgcaaaaattttaatgctagtcagtatgcaccaccacaggaaagttagatcccattagcacttgaaactacagctttggaaacttaggctaagttaatttggatttgttacttgattcacctactgaccttttcttttgtttgaagtgcttatcagcataatgagctaagtgtcatgcatatttgtgaagaaacaccctttttggtcccttttgggacagagaggtactccttgatctttatgaatgacaggttactgttttgccttattgcttaacttaatgtagtgaaataaagcagacaaagcttgaaaaaaaaaaaaaaagggcggccgctctag

SEQ ID NO: 3022 - DNA, 803 bp, Homo sapiens
  misc_feature (767)..(767): n equals a,t,g, or c
  misc_feature (790)..(790): n equals a,t,g, or c
  misc_feature (793)..(793): n equals a,t,g, or c
gagtttatatcagtttcacttcaattttttagggttgcataatttgccacaattttcatcagatattttggaatgatgtagcagaatacatcaagaaaatctccagttcttttgacaatttttgttagagctttttgattcttaccctcatggaaatacttgtgtataaatatagaaaatctcagattaaattattttcttggtagccttgcctgttcctattaagccacagaaaatattaataaggtgaatatgttaactttatttttcaaattattgttaatctcagcatactatgaagaacatgaatgtactgtacacacaaacaacttgatgtctcactaaatgaaagacacatgtgcattagatccatctacctttcaggcacagtcatggggtttttaactccacaacattaactggaattgtggaatacagataagatcataattgcaaagatgtgatattccctgaagaattttttatctatgatcaaaatgcaaaaaatttaatgtgttatggtaatgttccttattatccatgattaagtcacaccaaaatggcacaaagaccaggaaaccagccaagcattcactggaggcattactcagtgtctgagagattcagttgatttatatgaattaaggaatattttactatctagtatgtatcatttaaaataaaacaaaccttctaaagatgataattgtaaacatttgaattgtgtttttaattggaaaagtaatgagcttgtactgttaagctgnttcttattttatgttctatggcnttnttcaccaaat

SEQ ID NO: 3023 - DNA, 1010 bp, Homo sapiens
ccacgcgtccgaaattcttaaccatgggtcagcttatatcgaccttttgggtaaaagacattattcctttgaaacttcagaagcacgagtttgttttctgaaaaacacatgccattgcataccttttaacttgacatatgactgaaacttttgtcttaacaatccattttctacaaagactgcccttatatttattaaagatgacaaaaccaaaaccacttcttctttcatacattttctgctttcatgttctgtcattctgagatctttttttctttccctctctctgtcttcttttcccccagctgtcggcagcatccagcccctccagtcacagtcctcacagagcttcaggaaaggacccctttgcagagctctctttggaggatttcttataaatcactttaggtattgctacttgttgtgggagatggggacttaaatacttaaaaacaattaccaaacattaaacacaattcacgcttctctttcatttctttaaaggactctaggctccctctcctcctcctcctcttcctctattctttaggtgcagaatgaaaagataggacataaggaaaaacaacttttggaaaatatctgtaacataattatttaaagtaatctcatccactgctcacagtaaatggatgagatcggataaagtttgctttttaattaagggcaagtgaatacttaagccctttcgattagaaggattctgcatatgatccacactgcctctgtttgctggaagacagtgtaatttgttcttcttgatgctctagcccccagtttagatataccttctagatctttgggagtttatagtcttctgatttggcaagtttattagcacatctacttcagtaatagatctttggatgggcagtttaagggaaagtgtttttgtatataatgtattttttcacttttggaggattctttttgtataacttcaataaagattgtaagcaaaggttgaaaaaaaaaaaaaaaaaaaaaaaaaa

SEQ ID NO: 3024 - DNA, 1554 bp, Homo sapiens
  misc_feature (847)..(847): n equals a,t,g, or c
  misc_feature (888)..(888): n equals a,t,g, or c
ggcacgagtgcacctttagaggacttcagaggccctgccaagtctagcatgttcctgtctccaacaccgcctcctgcacatgcagagcagacagaaataccccacacattccccagcctctctgcccagtatgctcatccacagggttttctcactgctatgaaccagccccacagccccaggctcctgtcacctggctatgcccactcatcccacccgtctcgtgctgttgcttcccatagatggcgagcaccttgcaggcagccttctgatcagtactgttctcctagggcctggcacactgcagctgccctgtaaatgttcagctcagcgattgccaaataccagttagggaagaacactggcatctttttctattcattcccccttcaacatattttttgtacttttttatataaatgacttttttttttttttgagatggagtttcacccttgttgcccaggctggagtgcaatggcgtaatctcggctcagtgcaacctctgcctcccaggttgaagcgattctcctgcctcagcctcccaagtagctgggactacaggcacgtgtgaccatgccaggctaattttttatatttttagtagagagaggtttcaccatgttagccaggatggtctcgatgatctgacctcgtgatctgcccgcctcggcctcccaaagtgctgggattacaggcctgagccaccgcgtccggcctccataaatgacttttaaaggggttgtatgtttagtgtgaacaaagacagtacaaagcatataaaatacaaggtgaaagccccccccccaccacattagctgcgcccctgaagtgtctccagcagaanagatggatgaatggaaggacacacagatggacagagagcangaaagactgttagctctgctaacagtcaggactattccttctggactctgcgcctttgcctgcacagccaagtgttgatggcttgtttgttgttttcaccagagtgagctccttctggacatactgcctggcagcctgccttcctagggagctggcgccaaggcctctccctgatggcacacaaggagcctccttcctgtagcagcgcccagttttcatgtggatggattgtagttcatttgaccctccccagccgcgggccatccggcttgtgtccagcttttagctcttgccaatggtgctgcagtggccattcttgtagttatagctttgcgtactcaggaaggcccttctcccgactgcggcccccagcctggtccactaaatgcagcctgtggtcgggcagacagcattggggtccattaggaagaccaggtttgctgggcataagcttcacaggacgggagaacctgcccatggtggactgtcgttctccacagctcccttcccttgcccttcgggcctccaggatatgtttgcgggggtgggtgtggtgtccagctgttaccagcttctgagctagagctgtactgcctcacgtacacccccacctctgtaaatggtccttgattaaatcgtcctcatattaaaaaaaaaaaaaaaaaa

SEQ ID NO: 3025 - DNA, 1700 bp, Homo sapiens
gaattcggcacgagatgctccagaacttagggcctagagatagcaaacccgaattccaaaatgtctctgctacttatcaaccgtatgtggccttgggtaagtactgaacctcttttggcttcagcttcatcatttatgtgggaattcagctccacatagattctytgatctcctgcgctctttcagcaataaaagtggagcacattaatttgatgtgaatgtccccatggccgtatccacactgaatctggactttttaaagtgtctgtgatttgtttacatgtttagaggattttgatgactggtccagtgccaatgactcagaggcttaggcccatctgtgggtttggtttacgaacattgttatctttggtgggatccgctcagctctgatttgtttgcaagacagaccaaagaagcccacacatccacctttattcttctccgtcacagaaaagaaaccattttccatcttacaagcataacactctcaagtggtgaaatattagaaaagcagtgttcatgaatacatcgttaatgtttttaccagagcaacatcgagcttggctcagatctgccatggagcacagctagtctaagagctagaggcctggtgctttcaaaagacttcatgtgagatttttgtgtactttactcaggaaagtgtgaatctctaaaaaataataataataagcacatgttttcatgattcattaattctcctttttgttccattaaccatttcttggttgtgctcccaagctttcctggagcctccacaaaggagagtagccaggagtaatgagaggacggtcaggtgggcacttccaaaagctggagagacccttctgaggaccctccaccatcagcggggcctcaggggaccctgtcctaacactggtgtggctgctgggccagacgctcacctgcacagaactcctccctgctcccactctgaagggcgtttcagaattgactcatttccactgcagtctgccagaacccctgtaataaggagctgtgttatattacatctggggctgtgtgcatctttacaaatggagacacactattcaaagggaagatctctaaagtagggagcgtggtacttattctttgtttgaaacattccgatttgttgtcaggccttatttgttttttgtaagtgattgtatcggaggcttaagttgtgtggaatcagtcccacagtgttgaaagacaagtacctcttttctgacacttcttactacttttacaggtagtaacagctacaaatactctcccagaagtggagggacaccatttgtgggtggggagaaagagggagaggttctatgtccacttgcttcattaagaatgttaaggtttaagaaagttgattctgcttggagaatttctcaagctttacatttttttttcactgaagaaaataaacaaactctaagaggtgtgcatatataacatttctttagatctttacctaaawggaattttaatatattattggttgatgtaaattttgtttctgtggagttttgtttgttttgctttttgtagactgccatgtgcaagtaaaattcctgcttctgccatgttaaaattttaatatattttaaatgataataaacagagaaaacaaaatttaaaaaaaaaaaaaactcgtagggggggtcccggtacccaatcgtccctsatgagtg

SEQ ID NO: 3026 - DNA, 2058 bp, Homo sapiens
  misc_feature (3)..(3): n equals a,t,g, or c
  misc_feature (2031)..(2031): n equals a,t,g, or c
  misc_feature (2040)..(2040): n equals a,t,g, or c
cantgtctccctatccacccccatttccctttgaaataataactcactcataacagtatctttgccccttccacagttaagtttcagtgataccatactcaggagtgggaagaggaaatcatattcgtaatttcatttcgttgaagccctgcctttgttttggttctgaatgtctttcctcctcggtagcagtgagaccggtttcatttcatacttagtccattcagggacttagtgtagcaccagggagccctagagctggaggatatcgaatagattaaattttgctcgtctcttccacaagccctaaccatgggtcttaaaaacagcagattctgggagccttccatgctctctctctctcctcttttatctacttccctcccaaatgagagagtgacagagaattgtttttttataaatcgaagtttcctaatagtatcaggttttgatacgtcagtggtctaaaatgctatagtgcaattactagcagttactgcacggagtgcmaccgtgccaatagaggactgttgttttaayaagggaactcttagcccatttcctccctcccgccatctctacccttgctcaatgaaatatcatttwaatttcttttaaaaaaaatcagtttaattcttactgtgtgcccaacacgaaggccttttttgaaagaaaaatagaatgttttgcctcaaagtagtccatataaaatgtcttgaatagaagaaaaaactaccaaaccaaaggttactatttttgaaacatcgtgtgttcattccagcaaggcagaagactgcaccttctttccagtgacatgctgtgtcattttttttaagtcctcttaatttttagacacatttttggtttatgttttaacaatgtatgcctaaccagtcatcttgtctgcaccaatgcaaaggtttctgagaggagtattctctatccctgtggatatgaagacactggcatttcatctatttttccctttcctttttaaaggatttaactttggaatcttccaaaggaagtttggccaatgccagatccccaggaatttggggggttttctttcttttcaactgaaattgtatctgattcctactgttcatgttagtgatcatctaatcacagagccaaacacttttctcccctgtgtggaaaagtaggtatgctttacaataaaatctgtcttttctggtagaaacctgagccactgaaaataaaagagacaactagaagcacagtagagtcccagactgagatctacctttgagaggctttgaaagtaatccctggggtttggattattttcacaagggttatgccgttttattcaagtttgttgctccgttttgcacctctgcaataaaagcaaaatgacaaccagtacataaggggttagcttgacaaagtagacttccttgtgttaatttttaagtttttttttccttaactatatctgtctacaggcagatacagatagttgtatgaaaatctgcttgcctgtaaaatttgcatttataaatgtgttgccgatggatcacttgggcctgtacacataccaattagcgtgaccacttccatcttaaaaacaaacctaaaaaacaaaatttattatatatatatatatatatatataaaggactgtgggttgtatacaaactattgcaaacacttgtgcaaatctgtcttgatataaaggaaaagcaaaatctgtataacattattactacttgaatgcctctgtgactgatttttttttcattttaaatataaacttttttgtgaaaagtatgctcaatgttttttttccctttccccattcccttgtaaatacattttgttctatgtgacttggtttggaaatagttaactggtactgtaatttgcattaaataaaaagtaggttagcctggaaatgaaattaaaaaaaaaaaaaaaaaaaaaaaaaaaaaaaaaaaaaaaaaaaaaaaaaaaaaaaaaaaaaaaaaaaaaaaaaaaaaaaaaaaaaaaaaaaaaaaaaaaaaaaanaaaaaaaanaaaaaaaaaaaaaaaaaa

SEQ ID NO: 3027 - DNA, 1781 bp, Homo sapiens
gaattccccgggcccggggaattccccggggtggacctgggacgggtctgggcggctctcggtggttggcacgggttcgcacacccattcaagcggcaggacgcacttgtcttagcagttctcgctgaccgcgctagctgcggcttctacgctccggcactctgagttcatcagcaaacgccctggcgtctgtcctcaccatgcctagcctttgggaccgcttctcgtcgtcgtccacctcctcttcgccctcgtccttgccccgaactcccaccccagatcggccgccgcgctcagcctgggggtcggcgacccgggaggaggggtttgaccgctccacgagcctggagagctcggactgcgagtccctggacagcagcaacagtggcttcgggccggaggaagacacggcttacctggatggggtgtcgttgcccgacttcgagctgctcagtgaccctgaggatgaacacttgtgtgccaacctgatgcagctgctgcaggagagcctggcccaggcgcggctgggctctcgacgccctgcgcgcctgctgatgcctagccagttggtaagccaggtgggcaaagaactactgcgcctggcctacagcgagccgtgcggcctgcggggggcgctgctggacgtctgcgtggagcagggcaagagctgccacagcgtgggccagctggcactcgaccccagcctggtgcccaccttccagctgaccctcgtgctgcgcctggactcacgactctggcccaagatccaggggctgtttagctccgccaactctcccttcctccctggcttcagccagtccctgacgctgagcactggcttccgagtcatcaagaagaagctgtacagctcggaacagctgctcattgaggagtgttgaacttcaacctgagggggccgacagtgccctccaagacagagacgactgaacttttggggtggagactagaggcaggagctgagggactgattccwgtggttggaaaactgaggcagccacctaaggtggaggtgggggaatagtgtttcccaggaagctcattgagttgtgtgcgggtggctgtgcattggggacacatacccctcagtactgtagcatgaaacaaaggcttaggggccaacaaggcttccagctggatgtgtgtgtagcatgtaccttattatttttgttactgacagttaacagtggtgtgacatccagagagcagctgggctgctcccgccccagccyggcccagggtgaaggaagaggcacgtgctcctcagagcagccggagggaggggggaggtcggaggtcgtggaggtggtttgtgtatcttactggtctgaagggaccaagtgtgtttgttgtttgttttgtatcttgtttttctgatcggagcatcactactgacctgttgtaggcagctatcttacagacgcatgaatgtaagagtaggaaggggtgggtgtcagggatcacttgggatctttgacacttgaaaaattacacctggcagctgcgtttaagccttcccccatcgtgtactgcagagttgagctggcaggggaggggctgagagggtgggggctggaacccctccccgggaggagtgccatctgggtcttccatctagaactgtttacatgaagataagatactcactgttcatgaatacacttgatgttcaagtattaagacctatgcaatattttttacttttctaataaacatgtttgttaaaacaaaaaaaaaaaaaaaaaaaaaaaaaaaaaactcga

SEQ ID NO: 3028 - DNA, 1781 bp, Homo sapiens; identical to SEQ ID NO: 3027

SEQ ID NO: 3029 - DNA, 575 bp, Homo sapiens
ggcacgagccaggagtccttctccagagacttgatccgggcctggagctgttcattgacctcatgctgctcctccacctcacgctgggccttcttcctcaggccgtccagtcgctcaatttcctcttctgcttcatccacctgacgcttcaaagccttcaccctcaggcttagctggtctttctggtcattgacatgctgccgctcgtcttcaatctggatggatagttctttaactttccgctccagttttcgattggtagactgcagaactgtcttctccctctcttcagcctgtagccgctcctgcaacaactgattctgggactcaagctgagagaggctggcactaggcttctggaagccttctgagctggccaaccgggtcttcaggtccttgttctgtctctccaaggagattttgtcacactccaggtcctgccgagcagacctttcctgcatgagctctgtcctcagctgatccacctggtcccggccacgattcacccgatctgttagcagctccacggtgttcttctcctcatctaactctgtttccagccgtgagactttttc

SEQ ID NO: 3030 - DNA, 646 bp, Homo sapiens
ggcacgagcttactgaatgtagtgaccctgctgtggtaatgaacacttctagtgccttctaggcttaaaataccagacaaccccaaataacaaatgctcttttgtgttttgataggttggatttctgtttgcttaatattgggaatactgggggaaaaaaagatggtgttttcattctaaggattgtcctaaagaaagtgctactttatttttaagaaagtaaggccacttgttatataagaaataacaagttcccattgggtcccattttgcaaaaggggataaagaattagactgatagcattcttatttgattaattttttgttccactggctttgaaagacaaacgattgttaaagataaaattgtttttgttctttttcttataggtccttcagtcttggagactataagggagcctctgcacccagggaaaatgttaccctttacaggggggaagggtaaaccagtagggaatacagtacaatcccaaccctactgggaggggcgggagggaggtgttgccgtcactgtattaagtcgatgttgggaaacgttttaacatctggagcctttgtgggtggaaatatgtctccagttacaactccgcagtggatgtgaagaagcaaaaaaaaaaaaaaaaaa

SEQ ID NO: 3031 - DNA, 529 bp, Homo sapiens
tcatttagcatattgctgaaagtgggttaaagaggcccaattagtgagatcccagctgggacttttagatgggaaatatgcaggattgccagatgagatcatgggcctratctagtgtttatctgttaaatctgtttataactgcttaactcttgacttgcagacttttaaggcagccatttgacgtcacagggttgggaacgaggcttgtgccagtataaagccgctgtgatgtggggccattgggcccttctgtttttctcaactatgtgcatgcactttggagcttgacaaacagccgtgtccagtgaactccccccaaagaaaattgaagttgactcaccgtgaaaggcataccaccaaaagtgactcctaacccatgtacaattcagaaagaaagcactagttaacaagtgcccagtgtgtgattawttagttctagatctgtccagattttctttgttctggctctgttctcttcatggtggccctgcagtttttagatgttataaaacctccctacgattat

SEQ ID NO: 3032 - DNA, 963 bp, Homo sapiens
aattcggcacgaggttcggcgaagatagggaataaggaagcacaggagtaggggagaaggaagcacaggagtaggggagatatacagcggtcaggataagggggaaagggcggtggttgcgcaagaggtgaaacaagatgtgagagacaaggggtagggaagaaatggggcagcggttaggttcagaagcgcatagaccgtggcggacgggcaatgcgaggggcacagaaaggaactgaggggtgggctatttaaggagatggtcctcagccctctcttttctgcgtaggtctcctcctccaggccgcgcgcggatatgtcgtccggaaaccagcccagtctaggctggatgatgacccacctccttctacgctgctcaaagactaccagaatgtccctggaattgagaagttgatgatgtcgtgaaaagactcttgtctttggaaatggccaacaagaaggagatgctaaaaatcaagcaagaacagtttatgaagaagattgttgcaaacccagaggacaccagatccctggaggctcgaattattgccttgtctgtcaagatccgcattatgaagaacacttggagaaacatcgaaaggacaaagcccacaaacgctatctgctaatgagcatttgaccagaggaaaaagatgctcaaaaacctccgtaacaccaacttatgatgtctttgagaagatatgctgggggctgggaattgagtacacttcccccctctgtattaccgaagagcccaccgccgattcgtgaccaagaaggctctgtgcattcgggttttccaggagactcaaaagctgaagaagcgaagaagagccttaaaggctgcagcagcagcccaaaaacaagcaaagcggaggaacccagacagccctgccaaagccataccaaagacactcaaagacagccaataaattctgttcaatcaaaaaaaaaaaaaaaaaa

SEQ ID NO: 3033 - DNA, 1574 bp, Homo sapiens
  misc_feature (457)..(457): n equals a,t,g, or c
gtacggattcccgggtcgacccacgcgtccggcggcggcgacggcgacatggagagcggggcctacggcgcggccaaggcgggcggctccttcgacctgcggcgcttcctgacgcagccgcaggtggtggcgcgcgccgtgtgcttggtcttcgccttgatcgtgttctcctgcatctatggtgagggctacagcaatgcccacgagtctaagcagatgtactgcgtgttcaaccgcaacgaggatgcctgccgctatggcagtgccatcggggtgctggccttcctggcctcggccttcttcttggtggtcgacgcgtatttcccccagatcagcaacgccactgaccgcaagtacctggtcattggtgacctgctcttctcagctctctggaccttcctgtggtttgttggtttctgcttcctcaccaaccagtgggcagtcaccaacccgaagnacgtgctggtgggggccgactctgtgagggcagccatcaccttcagcttcttttccatcttctcctggggtgtgctggcctccctggcctaccagcgctacaaggctggcgtggacgacttcatccagaattacgttgaccccactccggaccccaacactgcctacgcctcctacccaggtgcatctgtggacaactaccaacagccacccttcacccagaacgcggagaccaccgagggctaccagccgccccctgtgtactgagcggcggttagcgtgggaagggggacagagagggccctcccctctgccctggactttcccatgagcctcctggaactgccagcccctctctttcacctgttccatcctgtgcagctgacacacagctaaggagcctcatagcctggcgggggctggcagagccacaccccaagtgcctgtgcccagagggcttcagtcagcygctcactcctccagggcacttttaggaaagggtttttagctagtgtttttcctcgcttttaatgacctcagccccgcctgcagtggctagaagccagcaggtgcccatgtgctactgacaagtgcctcagcttccccccggcccgggtcaggccgtgggagccgctattatctgcgttctctgccaaagactcgtgggggccatcacacctgccctgtgcagcggagccggaccaggctcttgtgtcctcactcaggtttgcttcccctgtgcccactgctgtatgatctgggggccaccaccctgtgccggtggcctctgggctgcctcccgtggtgtgagggcggggctggtgctcatggcacttcctccttgctcccacccctggcagcagggaagggctttgcctgacaacacccagctttatgtaaatattctgcagttgttacttaggaagcctggggagggcaggggtgccccatggctcccagactctgtctgtgccgagtgtattataaaatcgtgggggagatgcccggcctgggatgctgtttggagacggaataaatgttttctcattcaaaaaaaaaaaaaaaaaaaaaaaaaaaaaaaaaaaaaaaaaaaaaaaaaaaaaaaaaaaagggcggcc

SEQ ID NO: 3034 - DNA, 2735 bp, Homo sapiens
  misc_feature (66)..(66): n equals a,t,g, or c
gaattcggcacgagtggagctgtggtcaactcgagtgtggcagaagcacacagcttgccagcgcanaaaggcatgcttgtgatggactgtcatcgcactcacttgtcagaagaggtactggctatgcttagtgcctctagcactttgcctgcagtggtcccagcaggctgtagctccaaaattcagccattagatgtatgcatcaaaagaactgtcaagaacttcctgcataaaaaatggaaggaacaggctcgggaaatggcagatactgcatgtgattctgatgtcctgcttcagctggtgcttgtctggctgggtgaagtgctaggtgtcattggggactgtccagagctagttcagcgctccttcctggtggctagtgttctgcctggccccgatggcaacattaactcacctacaagaaatgctgacatgcaggaggagctaattgcctccctagaggagcaactgaagctgagtggggaacattctgagtcttccamtccamgacccagatcatctcctgaagagacaattgagcctgaaagtcttcaccagctctttgagggtgaaagtgagaccgagtctttctatggctttgaagaagctgacctagatctgatggagatttgagtgttggggtcatgagggggtgtggagtgggggtggggaaacatgtgagggagggtaaaggggcttagggaaaagggggcataccaggtggggtatttggtttctattttttaattttataccaccactcccccctgaagttgacttacacttccctgtggatttgtggattaattaggaaaaccaatagtaatcacgtctgagccaaggagctggcccattggtcattcacttctgctaaaaacaggtttttgtgactttttttttttttaaatttaaatcactgtgtttggtatttttctgacaaaattaagaaaaagaaaaaaaattatttgtgggcaaatgttaaatttttttgtttccccttttacctcaattgtatcatagtactgggtttttttgtttgttttattgtgtggccaatgtctttgggcatgatgctatctaatcattgttaatgtgagaacatttctgaagatgggaaagacaaattatgtagctcacaaactggtttattatatatatggataaaaaacttttttcattgtggtcttaacacttttatataaaaatgaaaatggaaaaaaagtcccactgaactctctcttccttctccttttctttccttccctctccagagatgttggtttctacagcaaccctagatataaaattgtggctttaaaaatgcatgaaaccacctttaattatccagaatgaatagatttgtcttttcctcaccaccttccctccaaaacatgacataaacaatattttttgcacttgtgatccttggcccctttccccattctcaacaccatccatccctctggacaaaggatcatacaggtgttattagcaagcaagagatactgaagcgatcaaacagttttagggtggaagccattcccagtttgagtcttcatcctgtaagcccccaggggcagtccctgctttactgaacttcatcctgttagatggagagcatgcctgtttaagggattactggtcctacagccaggagctaattgttcaagaagtgttgaactttaaaaagacaagaccacttgttgaaatccagcgtgctctgtggctttcccctatttctcttaatacttagggaagaatctgacaggaagaagcgcacaggggtgtgcacaaagaaaatgacatgaatctttatttttcactgccagcttcaaggaaagaaaattttttctacaatttgcatgagggatttttttaattgtatgtactcatggttgtaaaccaaaacgtactgtaccgtacagagaaaaggagcaaaaaaccaagtcttctgtttatcctgaggctttccacaatgttcccctcctgtgagccaaggaggcaaactgcacaagcttgtaaatggttcgtctttaaaatgtacataagtggaacatttaataaaatgaggggaaatggatttataaacttgttttttttctaggtgaccctgtttaataggctttcacagactggggaatgctcaagatgtgatgggcctggtggtacaggtgtgacatttgttaccacccatttctcccaccccaccctgcttttttgtttgtttgttttttcatcccccagcacactataatatagtgaactggaaaagtcccttccagaaacagcttggccagctttgtgaacctttgacatctgaaaacaaccaaggatccatctgggcttctcttccccagctttttgcctgatgccattttattgacagacaatggactttgaagtcagcctttgcctttgagaaagttcaagaactatggttggtcacgtctatctacaacctaatcctactctttggtagtctctgcagcagccacagccttagcagagctggggttcctgtcttctgcacacgattgactttcttgatgggtaattttttttaagattataccaacagtggatcagctgggttttggccaggaagttgtctttgtggactctgcctgcatggcttagtagtagaaggaaatttttttttggttttgttttttataattcagtttaatcaataaacatgtatttattgactrttaaaaaaaaaaaaaaaaaaaagg

SEQ ID NO: 3035 - DNA, 1121 bp, Homo sapiens
ggcacgagccagaaccttcctcttttttcttaaaaactcttcttaattgaatccaaagtatcttttaaatgttctacttgtgtaatcatgtcatctgtgaatattcagatttatcttctccttccaatccgtgtacatttaatctctttttctgtgccttatttcgggggctgggacccttcagtccagtgttgaagagaggcagccagtggaggtcttgtctcattcaaggactcagagcaaatgtgttccacatttaatttcactatgaaatataatatttgatgttcagttttgtagatgctatttatcagatcaaggaaagcccagtctatacctaatttgttaagggttttgctttttatcataagtgttgacttttatcaaattcttttttgtatctattaagatgatagatgattgattttcatatgttaaattaaccatggggtaaacaaacttacctttatcatgatatattattctttttgtatttcacaggaattagtttggtaatatgttgggtcaatgtttaaaaaagaaaatgatgtgtaatttttttcttttattgtagtatttctgtttaatttttggtatgaggattattcaggtctcataagagttaggagtatattctcttttaaaaaatatttgctaatttacactcccaccaacagtgtaaaagtgttcttatttctccacatcctctccagcatctgttgtttcctgactttttaataatcgccattctaactggcatgagatgatatctcattgtggttttgatttgcatttctctaatgaccagtgatgatgaactttttttcatatgtttgttggctgcataaatgtcttcttttgagaagtgtctgttcatatccttcacccactttttgatggggttgtttgcttttaccttgtaaatttgtttaagttccttgtagatgctggacattagccctttgtcagatggatagattgcaaaaattttctcccatcccgtaggttggcctgttcactctgatgacctatcattgttggacatttgggttggttccaagtctttgctattgtgaataatgccgcaataaacatacgtgtgcaaaaaaaaaaaaaaaaaa

SEQ ID NO: 3036 - DNA, 1971 bp, Homo sapiens
  misc_feature (1926)..(1926): n equals a,t,g, or c
cgcgtccgccacgcgtccgcgctaccaagatggcggcgcccatcttgcggtccttttcctggggccggtggtctggtaccctaaatctctcagtattgttgcccttggggctgcgtaaggcccactcgggcgctcaggggttactggcagcgcagaaggctcgaggtctgttcaaggacttcttcccggagacggggacgaaaatagagctcccagagctcttcgaccgtggcacggcgagttttccccaaaccatttactgtggcttcgaccccacggcagactcgcttcatgtgggtcatctacttgcgctgctgggcctgtttcatttgcagcgagcgggccacaacgtgatcgcgctggtgggaggcgccacggcgcgcctgggagacccgagcggccgtaccaaggaacgcgaggcgctggagacagagcgcgtgcgagccaacgcgcgagctctgcgcctagggcttgaggccctggcggctaatcaccagcagcttttcactgatgggcgctcctggggcagcttcactgtgctggacaactcggcctggtaccagaagcagcacctggtggacttcctggcggcagtgggggktcacttccgcatggggacgctgctgagccggcagagcgtgcagctgcggctcaagagccccgagggcatgagcttggccgagttcttttaccaggtgctccaggcctatgacttctattacctcttccagcgttatggatgcagggtccagctgggcggatctgatcaactaggcaacatcatgtccggatatgagttcatcaacaagttgactggagaagatgtatttggaatcaccgttcctctaattacaagtacaactggagcaaagctgggaaagtctgctggcaacgctgtttggctaaacagagataagacatctccatttgaattgtatcaattctttgtcaggcaaccggacgattcagtggaaaggtacctgaagctgttcactttcctgccccttccagagattgatcatatcatgcagctgcatgtcaaagagccagaaaggcggggtcctcagaaacgactggcagcagaagtaacaaagcttgttcatggacgagaaggattggattctgctaaaaggtgtacacaagccctttatcacagtagcatagatgcactggaggtcatgtctgatcaggagttaaaagagttgtttaaagaagctccattttctgaattttttctcgatcctggaacaagtgtcctagatacttgccgcaaagcaaatgccattccagatggtccccgagggtatcgaatgataacagaaggcggagtcagcataaatcaccaacaagtaacaaatcctgagagtgttttaattgttggacaacatattctcaagaatggactttccttacttaaaataggaaaaagaaatttctacattataaaatggcttcagttgtgatgaaaagtccttctggttgtccaaataaacttacccatcattcattctcaagacctctgaagggttggctccagaacttagacctttgcttatgcaaatcagaaaaacagaatggactaggactcagtgtgagtaacttcattatttttatgggccggttaataaatatttgtttaataatgggatgttttattttctgatgtacaaagcttgattaccatagaaaaccatgattttcagggttaatctctttttaaaattatacttcagaagagaaagaaatgctgctttcctatcttacccttcctgctctcctttttgtagtgatgaggaacaatgaaaaagaggtagtgtaaggaattgtgaggctgggcatggtgtaagtgctccactttagagagtgtaccttaattactactgtatttgcaaattaagggaaatttaggtcatcatttgattttcngaaatctaaaaggaactgaccatcattaccaagtctttctatata

SEQ ID NO: 3037 - DNA, 1971 bp, Homo sapiens
  misc_feature (1926)..(1926): n equals a,t,g, or c
cgcgtccgccacgcgtccgcgctaccaagatggcggcgcccatcttgcggtccttttcctggggccggtggtctggtaccctaaatctctcagtattgttgcccttggggctgcgtaaggcccactcgggcgctcaggggttactggcagcgcagaaggctcgaggtctgttcaaggacttcttcccggagacggggacgaaaatagagctcccagagctcttcgaccgtggcacggcgagttttccccaaaccatttactgtggcttcgaccccacggcagactcgcttcatgtgggtcatctacttgcgctgctgggcctgtttcatttgcagcgagcgggccacaacgtgatcgcgctggtgggaggcgccacggcgcgcctgggagacccgagcggccgtaccaaggaacgcgaggcgctggagacagagcgcgtgcgagccaacgcgcgagctctgcgcctagggcttgaggccctggcggctaatcaccagcagcttttcactgatgggcgctcctggggcagcttcactgtgctggacaactcggcctggtaccagaagcagcacctggtggacttcctggcggcagtgggggktcacttccgcatggggacgctgctgagccggcagarcgtgcagctgcggctcaagarccccgagggcatgagcttggccgagttcttttaccaggtgctccaggcctatgacttctattacctcttccagcgttatggatgcagggtccagctgggcggatctgatcaactaggcaacatcatgtccggatatgagttcatcaacaagttgactggagaagatgtatttggaatcaccgttcctctaattacaagtacaactggagcaaagctgggaaagtctgctggcaacgctgtttggctaaacagagataagacatctccatttgaattgtatcaattctttgtcaggcaaccggacgattcagtggaaaggtacctgaagctgttcactttcctgccccttccagagattgatcatatcatgcagctgcatgtcaaagagccagaaaggcggggtcctcagaaacgactggcagcagaagtaacaaagcttgttcatggacgagaaggattggattctgctaaaaggtgtacacaagccctttatcacagtagcatagatgcactggaggtcatgtctgatcaggagttaaaagagttgtttaaagaagctccattttctgaattttttctcgatcctggaacaagtgtcctagatacttgccgcaaagcaaatgccattccagatggtccccgagggtatcgaatgataacagaaggcggagtcagcataaatcaccaacaagtaacaaatcctgagagtgttttaattgttggacaacatattctcaagaatggactttccttacttaaaataggaaaaagaaatttctacattataaaatggcttcagttgtgatgaaaagtccttctggttgtccaaataaacttacccatcattcattctcaagacctctgaagggttggctccagaacttagacctttgcttatgcaaatcagaaaaacagaatggactaggactcagtgtgagtaacttcattatttttatgggccggttaataaatatttgtttaataatgggatgttttattttctgatgtacaaagcttgattaccatagaaaaccatgattttcagggttaatctctttttaaaattatacttcagaagagaaagaaatgctgctttcctatcttacccttcctgctctcctttttgtagtgatgaggaacaatgaaaaagaggtagtgtaaggaattgtgaggctgggcatggtgtaagtgctccactttagagagtgtaccttaattactactgtatttgcaaattaagggaaatttaggtcatcatttgattttcngaaatctaaaaggaactgaccatcattaccaagtctttctatata

SEQ ID NO: 3038 - DNA, 1986 bp, Homo sapiens
gcagataatagtcaaagtcattttgtttgtgctcatcataacttatgttccatattttttaacccacatcactcttgaaatcgactgttcagttgatgtgcaggcttttacaggatataagcgctaccagtgtgtctattccttggcagaaatctttaaggtcctggcttcattttatgtcattttggttatactttatggtctgacctcttcctacagcctgtggtggatgctgaggagttccctgaagcaatattcctttgaggcgttaagagaaaaaagcaactacagtgacatccctgatgtcaagaatgactttgccttcatccttcatctggctgatcagtatgatcctctttattccaaacgcttctccatattcctatcagaggtcagtgagaacaaactgaaacagatcaacctcaataatgaatggacagttgagaaactgaaaagtaagcttgtgaaaaatgcccaggacaagatagaactgcatctttttatgctcaacggtcttccagacaatgtctttgagttaactgaaatggaagtgctaagcctggagcttatcccagaggtgaagctgccctctgcagtctcacagctggtcaacctcaaggagcttcgtgtgtaccattcatctctggtcgtagaccatcctgcactggcctttctagaggagaatttaaaaatcctccgcctgaaatttactgaaatgggaaaaatcccacgctgggtatttcacctcaagaatctcaaggaactttatctttcgggctgtgttctccctgaacagttgagtactatgcagttggagggctttcaggacttaaaaaatctaaggaccctgtacttgaagagcagcctctcccggatcccacaagttgttacagacctcctgccttcattgcagaaactgtcccttgataatgagggaagcaaactggttgtgttgaacaacttgaaaaagatggtcaatctgaaaagcctagaactgatcagctgtgacctggaacgcatcccacattccattttcagcctgaataatttgcatgagttagacctaagggaaaataaccttaaaactgtggaagagatcattagctttcagcatcttcagaatctttcctgcttaaagttgtggcacaataacattgcttatattcctgcacagattggggcattatctaacctagagcagctctctttggaccataataatattgagaatctgcccttgcagcttttcctatgcactaaactacattatttggatctaagctataaccacttgaccttcattccagaagaaatccagtatctgagtaatttgcagtactttgctgtgaccaacaacaatattgagatgctaccagatgggctgtttcagtgcaaaaagctgcagtgtttacttttggggaaaaatagcttgatgaatttgtcccctcatgtgggtgagctgtcaaaccttactcatctggagctcattggtaattacctggaaacacttcctcctgaactagaaggatgtcagtccctaaaacggaactgtctgattgttgaggagaacttgctcaatactcttcctctccctgtaacagaacgtttacagacgtgcttagacaaatgttgacttaaagaaaagagacccgtgtttcaaaatcatttttaaaagtatgctcggccgggcgtggtggctcatgcctataatcccagcactttgggaggccaagatgggcggattgcttgaggtcaggagttcgagaccagtctggccaacctggtgaaaccccatctctgctaaaactacaaaaaaattagccaggcgtggtggcgtgcgcctgtaatcccagctacttgggaggctgacgtcaggggaattgcttgaaccagggaggtggaggttgcagtgagccgagattgtgccactgtacaccagcctgggtgacagagcaagactcttatctcaaaaaaaaaaaaaaaaaa

SEQ ID NO: 3039 - DNA, 1340 bp, Homo sapiens
gtgatggaacataggttaagatgccatactgttgaaagcagtaaaccaaacactcttacgttaaaagacaatgctttcaatatgtcagataaaaccagtgaagatatatgtctacaactcagtcgtttactagaaagcaataggaagcttgaagaccaagttcagcgttgtatctggttccagcagctgctgctttccttaacaatgctcttgcttgcttttgtcacctctttcttctatttattgtacagttaaagaagtggtgccgggtaggaaccacggttccttcgtccattagttggaaaagtaccagacctaaaactctaccaagctactaaaaccattgcacatctgtgcttcctaaaaggaaatatgcagcacgtggaggggaacacatacatgtcttgaaaataaactgctagaataaagaaatgctggagaaattgattataagagactatagctatttagtaaagtaagtaaaggcatatccattgtgtaaattaatagtttaaatataatttattttttccttttgatctgaatacttttaaagcttaagttttatcgtgtaaatacattagctaaactgaaaagtataagtaacatgctttgttgcagccaaaaaatgtaatctgcttttttatgacagaattattatagctgagctgacttactagcttttctatactatgtatatagaagaacatgtatattgagaaagaaaacatacttatatagaggaatttatgtaaccatgactttgtaattttgagaattcctcccagtgatggtcagtattcttttggaatgtaaaccgatttaatgccaaaccaccttaacctttgtttctcagtgttccttaacagcctgccttttattaatctcaggcttttttatgaacactctcatttcagtagaatttggaaaactaagcgtggttggaatttctttgaattctgttagtaatgcccaaaagaaaagtctcaagcagtccccctatccagtcatttttatggagtttcatgttgtccactatagctggacactgaaccttttgcctaatttattataaaggcctgaccctctattgtcccatcttcacccccattccagagcagaggagtctctgtggaccatgaattgcactgtctccctcctcatttctaaatgaaaggtattagatataaatttttttgaaaggttagttgtttgagatgctaagcaggataataaatttagattttaaaatgttccctgtaaaagtcagcccatgacaaggaaatttacaaaatactagagtatctagaagggtgaaaacaaaaaaaaaaaaaaaaaaa

SEQ ID NO: 3040 - DNA, 719 bp, Homo sapiens
ccacgcgtccgcctgcacgcaacagaagaagtcctcctgtcaggcgccagagaggaagaagggatcgtctgtctcgacataattccattagtcaagatgaaaactatcaccatctcccttacgcacagcagcaagcaatagggagcctcgagccttccaccctccgaatgtatctccccgtctgctacatcctgctgctcatccaccccagcagaatgcagtcatggttgacatacatgatcaggtacaataacagaatgtcttggaaatacagaagctgaaattttgtggcagtttgagattttttttttggctttttgttgcaaatttcttttagtttttacctaaaatgaagttatttaagttcctcattccttttaagaattgagatttaaattctacacagcttccatagaagaaagttgaacttaaaaaattagtatcggcccagcacggtggctcatgcctgtaatcccagcactttgggaggctgaggcaggcacatcacttgagcttaggcattcgagacaagcctagcacagtgaaaccccgtctctactggaagtacgaaaattagctggatgtggtggtacatgtttatgatcccagttgatgcagaagaatcacttgaactcaggaggtggaggttgcagtgagtcaagatcgcaccactgcactgggtggcagaacgagacttcgtctcaaaaaaaaaaaaaaaa

SEQ ID NO: 3041 - DNA, 688 bp, Homo sapiens
ccacgcgtccgagagttgggaacgaagtcatgcaagggacagaaagatgctgtcggtagtgagtggatggtcagcagtgggcggaggtgagacgtgagtgagctgaggaggttggctggagcgagatcctgagggtttctcttcgtctccacggcctggtgtaaggggctgcccccgcccccaagtttaaatgctctctagttcacgctctctaagcttcatcatgtcagttctgatcctcattcctggggcgagatcatgtggtgggcccttggtagctcaagattagcctggcagtgtctcatgtccatgtgccatgctgggggcatccaatttattgcaagtgctttggagagcaatttggcattgtttagtgaagctgaagacgcttaaaccccatggctcggtggtcctctctctgcatgtgtgtgtatgttccagaaaaccatcctgacatgcatgtgcagccttgtaactgtggttcgttatattgttggtaatggaaaaatattaggcacaataggagcctggatggctacctcatggctgtttatataatggagtgtatgcagcagtaagatgaatgtatgaggttgaaccatatggtgtggtttcacctaacactagagcaatatatgctgagtggagaaatctgaatgtatagctgagaggaaaaaaaaaaaaaaaa

SEQ ID NO: 3042 - DNA, 1940 bp, Homo sapiens
cccacgcgtccgacttcatcaaggccagctaatactgtgttaaaccgggctgaaaatgagaaaacttgggagatggaggaatggggaaatggcagtgggataggtagggaaggattactcttaattgttttaaaagccataggaaagtcttccttgtacgtggctgtaaatttataagaactattgtgtcacataaaccaacaagaatcaacctttgctgcttcagataatttgatttttccagcaaggaaattaataagttactgattcttcagcatagaaacaactgagaagaattaatgcaatgtttcttcactagaaaacccaacccttcatttcttttcattgctccaaaacccagttttcaactaatggttttctcattaaactaaatgtttagaaaagttgtttagagtttttctttttcttttacatagtcctcctgatccagtataagactatttagtaacgtgcatttgtatggtactatctaaagtaagttagattgatgtaagagatcgggtagctgcggaacaaaattagttatatcctaattaggtacagtgaatgacacaaaatcattttagcaatgcttcttaaccttttggggtcacaggcgttttgagactgatgaatcctagggacttatttacccaggaaaatgcgtatataacatacatatctccctaaagtttacaatattgtagtggttcatgggccccctggttaagagcccattctaaagtacaatagggcatcatcccttttcctgcaaagcccaaaagtatatttctagggcatgaaaataacttgagtctattttaaggaattgtttcactctagaggtagataggggacctggctagaatctgacattaaaatatactttttaaaaaatattatatttggggtggggaaagtgattaaaaggtgaaaaaaaaacatagtattcagaagttttggaggttaatgtctttctctaagatttgccactttagaaattcaacagaaaagaggtaaaacagaaatggaatgtatctggaacatttttggcctccatagtgcagatatactatattaacaagtaatacatttatttacctgtcagatctccaggttttaagattttgagctttctagtattaggattcattaaatgttcaattcatttcatattctaaggaattaggttatttacttactaattcaggatgttaaaataacatccaagtcggacaaccaccaccaatgcacacagttaatgagatttctaaaatataataagtacaatgtaacaaacgtatagaattttgcatttgttgccaaaattagatgtttaatgacagcttatttagttcccatttgtgggacttctggaacatagaaaccattatcttacctggttatcccttgactaaatagcatatctgcaggaaaatatcttgtttgtagtgatatgccccaatagtgattgatttcactcttgaaatgagttatatcacttaatttgtataaatgttatgagtggagagacatgtacatgttaaaagcatgttgcattatatattcattttttaaactctataaatgttaagaataatataattgcagaaatatttttcttaaatacaatgtgtaacaaaattctccgtagcaactcacccactttgcagtttatgtgatccacacttttaaagaaattccataaatgtatattttgtattatgtattatttcctggtccaaagaaaatatgtgaattcagttctaactttaagaatgtactgtttgttttcaagttcattgaaaaattgcattcagcctgcgaatggttgcagattgtatgttagatgaaaagtagaaataatttctagtttggaaaactggtgccactaaataaacaggcaattacataaaaaaaaaaaaaaaaaaaaaaaaaaa

SEQ ID NO: 3043 - DNA, 1526 bp, Homo sapiens
aattcccgggtgtgtgtctgtgtctgtctgtgtctcgcatggcgcgcggccccggacaagcgctggggattyccgtttraggcgtcactactgtcactgccatcaccccacggagccmcttctagaggggagtagacccggcccttcgccgggcagagaagatgttgcccctgtccatcaaagacgatgaatacaaaccacccaakttcaatttgttcggcaagatctcgggctggtttaggtctatactgtccgacaagacttcccggaacctgtttttcttcctgtgcctgaacctctctttcgcttttgtggaactactctacggcatctggrgcaactgcttaggcttgatttccgactcttttcacatgtttttcgatagcactgccattttggctggactggcagcttctgttatttcaaaatggagagataatgatgctttctcctatgggtatgttagagcggaagttctggctggctttgtcaatggcctatttttgatcttcactgctttttttattttctcagaaggagttgagagagcattagcccctccagatgtccaccatgagagactgcttcttgtttccattcttgggkttgtggtaaacctaataggaatatttgttttcaaacatggaggtcatggacattctcatggctctggccacggacacagtcattccctctttaatggtgctctagatcaggcacatggccatgtcgatcattgccatagccatgaagtgaaacatggtgctgcacatagccatgatcatgctcatggacatggacactttcattctcatgatggcccgtccttaaaagaaacaacaggacccagcagacagattttacaaggtgtatttttacatatcctagcagatacacttggaagtattggtgtaattgcttctgccatcatgatgcaaaattttggtctgatgatagcagatcctatctgttcaattcttatagccattcttatagttgtaagtgttattcctcttttaagagaatctgtkggaatattaatgcagagaactcctcccctattagaaaatagtctgcctcagtgctatcagagggtacagcagttgcaaggagtttacagtttacaggaacagcacttctggactttatgttctgacgtttatgttgggaccttgaaattaatagtagcacctgatgctgatgctaggtggattttaagccaaacacataatatttttactcaggctggartgagacagctctacgtacagattgactttgcagccatgtagtgaatggaaagaaattatgcaccttttatggaccaaattttyctgccagtaagaatttcagttgtgggcctccagtcttctggaatgtcttcactgcagctgctggaaatcactgctttcattcccacaaaaccagtattacttttttttaaaaaaaaaaaaaaaaaaaaaaaaaaaaaaaaaaaaaaaaaaaaaaaaaaaaaaaaaaaaaaaaaaaaaaaaaaaagggcggcc

SEQ ID NO: 3044 - DNA, 2576 bp, Homo sapiens
ggcacgaggttttttttttttttttttcacactttttatactgattttatattgaaatgaaaatattttggatagactgggttaaaaaaaaattaagttcacctgcttctttttactttttgaaatgtgactgtcagaaaatttaaagtcacatatgtggctcacactatttctgtgggacagccctgcctctagctaggggctttggtgagaaccagatgagttgatgggtctcctctgggccctgcttccctggctgctgaggtgcaggaactgtgaggggagggcagcctgtcacggtgcccaacacagggcagggctggacaggtacaagtggaacaggcggataagctgggaagggcacagagaaaaggagctcctcgtgacagcactttcccaccttttattattcaacacatggaagggggtggagacacaaggatagggcaatggtgagtttcaataaataagagaaacaggatggacaggcagtgggcccatgcctgcacggccccacataaataaccaggttgctgagccagagtggaagtcagggctgggcctggcagccgcctgcactgcccagaagcactggcaccacagggacacagaaaccactgaggcccaaggtgtgctccagccccaccaagtcttctccctaaagctcctgagatcttggggctggctgggcaggctagggctctgtatcacagtcctgccgggatcaagtctattttttcagtttcattaaaaacagctgggggaggggcaggcacatgcattaagccccttccgtaggcagagccatggatggacagccccatgggggccttgaaggcagaggccctggaagcagcaaaaacggggctggataaagctactaatgggagggatggtagagcccagctccccagtcccccacaacccagcccagaacctacaaagagctgaagaggccctgggtactgagacgtctctccttacttcacagtcagaaaaatggacccagcgatggccacagatgtgcccaagattagaacccagggactcactctcctagcccaggactttctgctaccccttccctttatagacctgctggaagaggagggggacgcacatctgctctagggccctgtacagaggcaagggtgtggctaattaccaaggaatggggccaggggtgacgggcacaggcccctcccctctgccaagcccagcctctgatgatacagagaatcccgtgggctcctaggatccagccagggcaggcacgggggtcggggcatccttcaggggagcaacatggcagcagggccaggggcggggctcagcctgctcctgtacacagtgcccgccggccacctgcctcctcactggggcagacgctcccacctccaggccttggtctttgctgtctcgtctgctgggccattgcttctcggtcctcacagtcccagctgcagctccacctcctccaggaagccttcggaacctcccagggcagggccgcagtgtccttagactagaccgcccctcagatgaccaggttgctctcacttagccggaccacatagcggttctcctcggccttgttctctgctgggggcttcagccactttgtacggcttccgccacttcctagcagggcctgctgctcaggggggaggccaggctgtggggagtcagggagatcaccccacgagggcccagcctccgtgatggtcttcacctcagacaccattgaacttgtccgctgctcaggaattcgagccacgcggaacctgcccacagacaagatggtgatctcgccctgacgccctgccttggccccggccttgggaaccctggtcgggttaggcagaaggctgggaacaggagtagtggcggctacagcctcaggggacagcagcacctcgggccacttcttctggctacagcgggagcagcaggggccagagagcgaggccaggccctgcacggtgtggagatggtggcggtgcgggcagatgtgtggcacgttcgggggcgctggcggcagcttggacacaggcctgtggctcgtctgcaccagctgtttgctgtggtactctttcagcagctcctccagggccgcagcattctctttcttctctgtgatcaagcgcaccaggaccccaatggtgtcctcattggcatcctcagtccggtaggcagggttgattccactgcctccacctccagggccgggcccgacctccttgtgcgccgtgcagtggtagcccttccgcttgaggaggttgcacaccaggatgcccaacagccccatgaggcagaagacagggacgatggcgatgaccgcgtactgggcggctgtctcctctgggccacctgcccgggtgccgttcccaggctgccgtgtctcaccaccgctgctggcccctgctgccacctccacgccacgtcgggcccgccgcccccactcatcacagccatgagtacccagaggtgcccaggaacatggttgacatggaacgcggggaaccccccaaggcccaaaccacccaggccagcagtctccacagagtgtatctcga

SEQ ID NO: 3045 - DNA, 6705 bp, Homo sapiens
  misc_feature (405)..(405): n equals a,t,g, or c
  misc_feature (2722)..(2722): n equals a,t,g, or c
gaattcggcacgagcagagatcgcgagcgaggcaccagcctgcagccggcccccagcacatcctcagccgcacagacactcggcgaggtggaggtgagggcgggcgccagcgaactcggagaggggctcgctcactcccaggcgatcccagccgccaccgccgccgcaccagcagcagcaacagcagcagcagcttccttcctcagactcccctcgagaggctggccaagcgggtgtagccgttgggggaggctcccgccgggggaacccggcgaggacaagagcagggcggccgccttccrctcgggctgtccggcggcggctgcctccgcccgygtgtccgtcaagggtgccgcgggatgtgtgtcagtttacgcctctgagatcacacagctgcctgggggncgtgtgatgcccaaggcaagtcttggttttaattattattattatcattattgttacgcttggctttcgggaaatactcgtgatatttgtaggataaaggaaatgacactttgaggaactggagagaacatatatgcgttttgtttttaagaggaaaaccgtgttctcttcccggcttgttccctctttgctgatttcaggagctactctcctcctggtgaggtggaaattccagcaagaatagaggtgaagacaagccaccaggactcaggagggaaacgctgaccattagaaacctctgcataagacgttgtaaggaggaaaataaaagagagaaaaacacaaagatttaaacaagaaacctacgaacccagctctggaaagagccaccttctccaaaatggatatgtttcctctcacctgggttttcttagccctctacttttcaagacaccaagtgagaggccaaccagacccaccgtgcggaggtcgtttgaattccaaagatgctggctatatcacctctcccggttacccccaggactacccctcccaccagaactgcgagtggattgtttacgcccccgaacccaaccagaagattgtcctcaacttcaaccctcactttgaaatcgagaagcacgactgcaagtatgactttatcgagattcgggatggggacagtgaatccgcagacctcctgggcaaacactgtgggaacatcgccccgcccaccatcatctcctcgggctccatgctctacatcaagttcacctccgactacgcccggcagggggcaggcttctctctgcgctacgagatcttcaagacaggctctgaagattgctcaaaaaacttcacaagccccaacgggaccatcgaatctcctgggtttcctgagaagtatccacacaacttggactgcacctttaccatcctggccaaacccaagatggagatcatcctgcagttcctgatctttgacctggagcatgaccctttgcaggtgggagagggggactgcaagtacgattggctggacatctgggatggcattccacatgttggccccctgattggcaagtactgtgggaccaaaacaccctctgaacttcgttcatcgacggggatcctctccctgacctttcacacggacatggcggtggccaaggatggcttctctgcgcgttactacctggtccaccaagagccactagagaactttcagtgcaatgttcctctgggcatggagtctggccggattgctaatgaacagatcagtgcctcatctacctactctgatgggaggtggacccctcaacaaagccggctccatggtgatgacaatggctggacccccaacttggattccaacaaggagtatctccaggtggacctgcgctttttaaccatgctcacggccatcgcaacacagggagcgatttccagggaaacacagaatggctactaygtcaaatcctacaagctggaagtcagcactaatggagaggactggatggtgtaccggcatggcaaaaaccacaaggtatttcaagccaacaacgatgcaactgaggtggttctgaacaagctccacgctccactgctgacaaggtttgttagaatccgccctcagacctggcactcaggtatcgccctccggctggagctcttcggctgccggtcacagatgctccctgctccaacatgctggggatgctctcaggcctcattgcagactcccagatctccgcctcttccacccaggaatacctctggagccccagtgcagcccgcctggtcagcagccgctcgggctggttccctcgaatccctcaggcccagcccggtgaggagtggcttcaggtagatctgggaacacccaagacagtgaaaggtgtcatcatccagggagcccgcggaggagacagtatcactgctgtggaagccagagcatttgtgcgcaagttcaaagtctcctacagcctaaacggcaaggactgggaatacattcaggaccccaggacccagcagccaaagctgttcgaagggaacatgcactatgacacccckgacatccgaaggtttgaccccattccggcacagtatgtgcgggtatacccggagaggtggtcgccggcggggattgggatgcggctggaggtgctgggctgtgactggacagactccaagcccacggtagagacgctgggacccactgtgaagagcgaagagacaaccaccccctaccccaccgaagaggaggccacagagtgtggggagaactgcagctttgaggatgacaaagatttgcagncycttcgggattcaattgcaacttcgatttcctcgaggagccctgtggttggatgtatgaccatgccaagtggctccggaccacctgggccagcagctccagcccaaacgaccggacgtttccagatgacaggaatttcttgcggctgcagagtgacagccagagagagggccagtatgcccggctcatcagcccccctgtccacctgccccgaagcccggtgtgcatggagttccagtaccaggccacgggcggccgcggggtggcgctgcaggtggtgcgggaagcagccaggagagcaagttgctgtgggtcatccgtgagaccagggcggcgagtggaagcacgggcggatcatcctgcccagctacgacatggagtaccagattgtgttcgagggagtgatagggaaaggacgttccggagagattgccattgatgacattcggataagcactgatgtcccactggagaactgcatggaacccatctcggcttttgcagtggacatcccagaaatacatgagagagaaggatatgaagatgaaattgatgatgaatacgaggtggactggagcaattcttcttctgcaacctcagggtctggcgccccctcgaccgacaaagaaaagagctggctgtacaccctggatcccatcctcatcaccatcatcgccatgagctcactgggcgtcctcctgggggccacctgtgcaggcctcctgctctactgcacctgttcctactcgggcctgagctcccgaagctgcaccacactggagaactacaacttcgagctctacgatggccttaagcacaaggtcaagatgaaccaccaaaagtgctgctccgaggcatgacggattgcacctgaatcctatctgacgtttcattccagcaagaggggctggggaagattacattttttttyctttggaaactgaatgccataatctcgatcaaaccgatccagaataccgaaggtatggacaggacagaaaagcgagtcgcaggaggaagggagatgcagccgcacaggggatgattaccctcctaggaccgcggtggctaagtcattgcaggaacggggctgtgttctctgctgggacaaaacaggagctcatctctttggggtcacagttctattttgtttgtgagtttgtattattattattattattattattattattatattttatttctttggtctgtgagcaactcaaagaggcagaagaggagaatgacttttccagaatagaagtggagcagtgatcattattctccgctttctctttctaatcaacacttgaaaagcaaagtgtcttttcagcctttccatctttacaaataaaactcaaaaaagccgtccagcttatcccatcctctgattgtcttctgacttaagggatttactgtggtgtaggttctgccagccaaccctacaagctgccatttccagtcctagcatttaagtaggatgttgttgcctttaacttttcttatccaggggaaaattgccattttagggtcagcatgaacagctctttcttgtatgcgatttaaaacaaactggaaaggaaacttcacacgtcaaaatccatagaagcgcctggacgaggcttaaagtgctttgtgagtgaataggagccattcgctaattctagacccacagtgtctggtggtggggcttcccttgtggggcttctggtggtggttttgccttttcttttccctcctccatgttcttctaaaacatatacatatatacatacacacatacacatattcttcaggtctctaagcccctggaagcagcattgtgtgatattctcagaggcaggggaaaatagagggaaaaatagagactattggtatgttctccccatcagcgagttattgtaactggtcaccactggacgggaaggagaacagaggagagggaaagagaagcccaacctctgtgatcatatgagggccaaggctgagcagtgtagacagagaccctttgaaatgcatttgtctctcaaatagactagtaaacaccgacttctcctttgggttacaaacaccatttcaacctttcgggagagtcagagctaggatgtacaagaactgattctaaccagaagtccgcaagtactgtggacaagaatgcttaaccatgctgcttcagccttgagagacctaggttcttacacatatgcacacacgcatacacacatgcacgcacacacacatacacacatgcacgcacgcacgcatgcacaccaatttatgtttttattaagtgccttgaaaaaatgaagaaaaatgtattttccctttatgtaaaaattagtgaatatcttatgaattaaggcattcctctttccctaaccccgatggctccattcccaagtaccccaactcactgctgatcctattaaaggaatgagtcctgctacccgagtggtagtcatagccctagatgactctcaactactcttcaaagggaggcatcaggaatagaatgaaactgtgtgaaggataagattgttcgcatcaagatccaaatcttgatttcatattaacgcctaaggattgcctgtgtgctggaaatatatttgaaactcaaccagtatgcccagcctattgcatatcattgtcagaccatttttgctgctgtggtcacccacgatttcatttgtcttatacccaggtgaaaggggaagggtgaatgggactggctggttcctttaaatgttaacttatggaaatgctagttcaaatggtaatgtcacagtgttttgtatgcagagagcaagagttcaaccaacagctgtttattcatgtgtgtgtgtctttgctgctttgagttctctgtatctactgtgtatgtgaatggtcatgtgggactcagtggtggtgttgtgactttgacctagggtccgagtgtcacagctgatcttggcactcggcactcattggcacagtggtagttagaggtgaaaagtagagctgtcaagcccaagggcttagctttagggctcctcctgagttcggcccacagtagaagcaagattttaactagccccttttcctcttcaccctcccatgatgcgcagtgttcagaaagctggtaagtcctagggatttccagaagtagcctgcagaagaaggtaagtttgaaagccactccaggggtcctgatgctgtcatgctcagtgagccattttacagttctccaaagtctagccctgtttcggacctgcacttcacctctaagttatgtacaactcaacctgcatccctctaaaagtcctatatccatattcaccattggctaatttgaggccctgagtgggcyttgaatgctaaaaagaagcagggtacgsagggctacatgtagataccacaccaaggctggaggctgstctgtcrtaagacagaaagaaagacgctgggcccaattttgacttggccaggggacaccttggtgtgtttgttatctttatctgtgggtaggctagctgacccatctccttgagtcattccctttgggaaaccccactgccagtattgatctcctttttgccttgtactgaatgacacattacctccacactctcccggactaggtggtcaacagggccacagggttgctttctgtctttggtggggcaggggagttgacagggatgagggtccaaggaataagcatgaatgacaagaaaacaagggaaagagttaacctgtcacatagcaggttaactttttcagggtttgcagttagaggtattcgaccattcactggctgagccagatcacgggaacttgagagcttttactgtgattcttcaatgtaaaaaataaacaacaatgtcaaactgtgtttatatgatttgtataaagcctttttaagattactatttaaataaacattataccagagaaaaaaaaaaaaaaaaaaaaaaaaaaaaaaaaaaaaaaagggcggccgc

SEQ ID NO: 3046 - DNA, 1415 bp, Homo sapiens
acgcgtccgcccacgcgtccgcacaataaatgtgagcaatttcactgtaagcagatcccatgctcatgaggcatttaacacagcttttaccactcttgctgcttgcgtggccagtatcgttttggtacttttgtacctctatctgactccatgcccctgcaagtgtaaaaccaagagacagaaaaatatgctacaccaaagcaatgcccattcatcgattctcagtcctggccctgctagtgatgcctccgctgatgaacggaaggcaggtgcaggtaaaagagtggtgtttttggaacccctgaaggatactgcagcagggcagaacgggaaagtcaggctctttcccagcgaggcagtgatagctgagggcatcctaaagtccacgagggggaaatctgactcagattcagtcaattcagtgttttctgacacaccttttgtggcgtccacttaatttgtgcctatatttgtatgatgtcataatttaatctgttcatatttaactttgtgtgtggtctgcaaaataaacagcaggacagaaattgtgttgttttgttctttgaaatacaaccaaattctcttaaaatgattggtaggaaatgaggtaaagtacttcagttcctcaatgtgccagagaaagatggggttgttttccaaagtttaagttctagatcacaatatcttagcttttaccactattggtaatttcagagtaggcccaaaggtgatatgactcccattgtccctttatttaggatattgaaagaaaaaataaactttatgtattagtgtcctttaaaaatagactttgctaacttactagtaccagagttattttaaagaaaaacactagtgtccaatttcatttttaaaagatgtagaaagaagaatcaagcatcaattaattataaagcctaaagcaaagttagatttgggggttattcagccaaaattaccgttttagaccagaatgaatagactacactgataaaatgtactggataatgccacatcctatatggtgttatagaaatagtgcaaggaaagtacatttgtttgcctgtcttttcattttgtacattcttcccattctgtattcttgtacaaaagatctcattgaaaatttaaagtcatcataatttgttgccataaatatgtaagtgtcaataccaaaatgtctgagtaacttcttaaatccctgttctagcaaactaatattggttcatgtgcttgtgtatatgtaaatcttaaattatgtgaactattaaatagaccctactgtactgtgctttggacatttgaattaatgtaaatatatgtaatctgtgacttgatattttgttttatttggctatttaaaaacataaatctaaaatgtcttatgttaaaaaaaaaaaaaaaaaaaaaaaaaa

SEQ ID NO: 3047 - DNA, 925 bp, Homo sapiens
ccacgcgtccgccagagtcctggccctgagcgggaatcgcagtggccgaggctgagcggcaggtagaaggggcgtctccggggcttcacagggaacacaggggcttcggcccaaccacaagcggatcgccccgaccctcactcctggcgtctgagtctctggcgtagccatgctgagtgggcggctggtcctgggtctggtctccatggctggccgcgtttgtttgtgccagggcagcgcgggatccggggccatcggtccggtggaggccgccattcgcacgaagttggaggaggccctgagccccgaggtgttagagcttcgcaacgagagcggtggccacgcggtcccgcctggcagtgagactcacttccgcgtggctgtggtgagctctcgtttcgagggactgagccccctacaacgacaccggctggtccacgcagcgctggccgaggagctgggaggtccggtccatgcgctggccatccaggcacggacccccgcccagtggagagagaactctcagctggacactagccccccatgcctgggtgggaacaagaaaactctaggaaccccctgaaccccaagagagggaggaccaggatccgaatgggctgggtgagcacgaattaccgaggccttccctttgatacagtccaggatttgtaagggatgaagacccctgggccccattctgttggggtccatacatactctccgaagatagcaacttgcttcaggtcaaagtgaacccgagaaaagagaagaatcactcactactgctcttgccctggactattcaggaagggcagcccggatgttccatgttaaatcgtgacagaattgcaccagacctgatgagttggaaacaatcctatacattaaaagaaattacactatgaaaaaaaaaaaaaaaaaaaaa

SEQ ID NO: 3048 - DNA, 699 bp, Homo sapiens
  misc_feature (683)..(683): n equals a,t,g, or c
tcgacccacgcgtccgctcttggaaaaaaattatgttagtcttctataattatagaaataataaatgttcacaatagaaaaattgggaattttagaaagagtagaaaaagaaatccctataatatccccacccaaaggcagttactattaaatttgggtatatttcctaccagcattttttctcatgcatgcatttcttttttacgtagctgtgatcatgaaaacaagataattcgtgtcctgtgttattcatttgacatattccataagtaagctccattatagaaagtaacttaaaatgatgttgtatgtttgtttttgtttgtttatgttttaataaagcatgtggattacttctataagacgaaagggaaaatgtagatcctatgcacaagtatttatttccctccaaaccccctttttataatatgtattgttgattttatagagtgacctgatcagtacatgtaggggctcaaatcacagctattctttaatacttcgggttacttcattgctattattgtttgttactaatatgtaagatgaggaaaagacaaccttttggtgggtgttgggactgggagggagggcattgaggacagatgaaccaaagctggatatggaaggaaacccaacttcataccaaaaaaaacaaaacaaaaaaaaaaaaaaaaaaaaanaaaaaagggcggccgc

SEQ ID NO: 3049 - DNA, 1236 bp, Homo sapiens
ccacgcgtccgagacaacatccggcccagcagctctggggggtactgggtgggcatgtcgaccatccgccctaaccctgggttttccatgctggatttcttatctgagagaccctggattaaaaggatgatttttaagctctttagtcaagagacggtgatgaagtttgtgccgcggtacagcctcgtcctagaactcagcgacagcggtgccttccggagaagcctgcatgatcccgatgggctggtggccacctacatcagcgaggtgcacgaacacgatgggcacctgtacctgggctctttcaggtcccccttcctctgcagactcagcctccaggctgtttagccctcccagatagctgcccctgccacgcaggccaggagtcttcacactcaggcaccaggcctggtccaggaggagctgtggacacagtcgtggttcaagtgtccacatgcacctgttagtccctgagaggtggtgggaatggctgcttcattcctcgaggatgcccgggccccacctgggcttgtctttctgtttagagggaagtgtaacatatctgccatgaggaacataaattcatgtaaagccattttctcttaaacaaaacaaaactttctaagtacagtcattctctaggatttgggaagctccttgcacttggaacagggctcaggtgggtggagcagtaaggcactacccagagagcttgctgctgcggccctgtcctgcggcctcaaagttcttctttactatatataacgtgcggtcatacctttcttcgttgtggtggggatggaagagcagagggagcatggcccaggggtgttgaggccagcggtgagagccgtgttagccaagacatggaactgtgttctcaagggttatgtggggcgtgggctctccatagtgtgtatgaaaaagcttgttgactctagcggctcagagaggactttgctgggtttctttctgtgaatatctccgtgctgaccatgctggaattggatgattctgcaattcgggacctactgcaggggtccgtttagtaacgtcttgtctgtgatctttgttcttgacctctagaccccaagatgtgaacagtgcacgtgttaatgtcatctttgctcatgtgttataagccccaagttgctgtatattttcacaagtatgtctacacactggtcatgattttgataataaataacgataaatcgaaaaaaaaaaaaaaagggc

SEQ ID NO: 3050 - DNA, 413 bp, Homo sapiens
ccacgcgtccgaagaaataaaaatgtctgtttacagaggacatgataatatacgtagaaaatccaaaagaattgacaacaaaactcctgaaagtttttttagtccttattagtcaattagcaaggttgaaggatacaaggttaatacacaaaagccaatcacttttctatatggcatcaacaaatgaaactagaagttaaaaacacattgccatttacattagcacctaaaagaatgaatacttatatatatatacacatatatatggacctatatacttatagctataaagctaacaaaacatgcaatatctgtgcaaggaaaaaaaaaaaaaaaaaaaaaaaaaaaaaaaaaaaaaaaaaaaaaaaaaaaaaaaaaaaaaaaaaaaaaaaaaaaaaaaaaaaaaaaaaaaa

SEQ ID NO: 3051 - DNA, 639 bp, Homo sapiens
ccacgcgtccgaagcactttcacttgaagaacctaaaatgattgactcattcatagtaaatatgggcatgtaaactaataaatatgcactggatacatatatggatttatgaagaaggcgatttagtcaagaggatgtaattaaaatatgtggtctctaaaatattccagttacaagatatttgttttattaatatttgctggctaaaaacaaatgtggtttttatatatttttgtagtgtgttgagaagagcaaaagctttataaatatacctgatgcgctgtagaatgaaaatgtaaaagataacctgtatgtgttccgagctttaattttttgtttacaaattgaacagtgttacatgggctgtccagtcctgattatagagaggaagaaatggtaacagtatggcagataagaattacaattatagaaaatgaggggaaaataacaaacctgttttatgaaaattcactggtgctgtttacattggaataaaaagctctataaggaaaaaaaaaaaaaaaaaaaaaaaaaaaaaaaaaaaaaaaaaaaaaaaaaaaaaaaaaaaaaaaaaaaaaaaaaaaaaaaaaaaaaaaaaaaaaaaaaaaaaaaaaaaaaaaaaaaaaaaaaaaaaaaaaa

SEQ ID NO: 3052 - DNA, 744 bp, Homo sapiens
  misc_feature (271)..(271): n equals a,t,g, or c
ggccccaggacagccggagctcggcctgcggtgggggcgcttcctgtggacgctgcgcctcccatcgcccgggtgcctgtccttgcccagcgccaccaggctggaggcggagtgggaggagctggagccaggcccgtaagttcgcaggcaggggtgggtgtgggacggggctgcttctctacacakcctcyacgctggccttcaccttcacccctgcatcgtcggtgaccctgggaccctccaggcagcgtggcctgtggcaccgtgaggnttgggacccaccgaggcgcagaggcggcccgaatgcagccctggttcaggcccggagagggtttgcgggtagttgcacggacaattcggcggggtgctgcctgttgctgccattagcccaggaggaggtcgtgggacggggagggtgggatggacggcggacaggcagtccccacgctgctgggtggcgccgggcttggtggggtcttccactgtgtgcccttctcgccgaggccggtcccccgggtgtggggtgccctgctgcggactcctccgcgagccccatcgtcgcgcctgtggacgcctaggcaagagcggccctctgcagccaagagaaataaaatactggcttccagataaaaaaaaaaaaaaaaaaaaaaaaaaaaaaaaaaaaaaaaaaaaaaaaaaaagggsggccgctctagaggatccaagcttacgtacgcgtgcatgcgaagtcataactcggctata

SEQ ID NO: 3053 - DNA, 678 bp, Homo sapiens
ggcacgagacttactgaccggcctgggctgctctgagacatggaggaagccagtgaaggtggaggaaatgatcgtgtgcggaacctgcaaagtgaggtggagggagttaagaatattatgacccagaatgtggagcggatcctggcccggggggaaaacttggaacatctccgcaacaagacagaggatctggaagccacatctgagcacttcaagacgacatcgcagaaggtggctcggaaattctggtggaagaacgtgaagatgattgtccttatctgcgtgattgtttttatcatcatcctcttcattgtgctctttgccactggtgccttctcttaagtaacagggaacctctcccacctgcccttcttttcagggacaaccctccataaatgtgtgccaagagggtctcctttcctgtcttcctctacagagaatgctgctcggtcctcctacccctcttcccgaggccctgctgccacgttgtatgccccagaaggtaccttggtcccccggaaggagagaaaaaagagagatggactgtggctgcatttcttgggtccttagagtgggctggagagacctagagggcccagcatgtggctgggaaactgttggtggccagtgggtaataaagacctttcagtatccctaaaaaaaaaaaaaaaaaaaaaa

SEQ ID NO: 3054 - DNA, 2785 bp, Homo sapiens
gataaagaagaaagtaggtgggttacatgaaagcagttatacatcaaaaatatggttttcttcatcttcttttcctccttttcctttctcttcatcgtatctcttcagccacattcacccttaacacaaaaagttcctcctgaaatcctcatgctattttcttggctcaaatccctttgattaccccagattttttggaagaaatccttccaaaggtatttttcatctcaaaaagtttttttgcattcattaccttacttcatgccctcttctttcaaagttccagagagcactgcattcactttgctgcattaagagggaaatagcgtcttctctcctcctatcctgttattgactctcttgtggcttctttcttcatcagagaagcaagtggctcaaccagggcttagaaaaggcacagtgatcaagtctgttcagagccagcctctggctggtgaacatccttgtacttcctgtcctgatctcactcacccctaakgaggcagagagaagggtaaccagtgtggctatcttggctcatcctcgtgggtacaatcaatagctgaggcatgggcttggttgtagagaaacaagtggggccagaggagaggggagaaaggagggaggggagaaagattcccccattggaaattctgctgggattcagtatcctagctattctgatgtcctagatttgaatctgggtttctaaacatatgctctacattatgaaaatgcccaaaaacacatataaattggcttttcttctgtgtttgtcctacattgcagttctataactattttattaagctctctagaactggttcttatatttaccaacactggttattaggttttgaaactcaaaataagaaccatttgtaggcatctgtataaaacaaaatacttattgatcatctactaagcattataccaggctttataacttcctcattcttcttctaagtgttcagtgacttgtggctatttctctaattaaattgaaactcctggtgagaaactttaaggctctccaacaagcaatgtatgttccctcactgtaacttctgtcccagccatacaaactccttctcagttcaccttctctcaagtccaggctttcttcagtgttacttgtgtacctaaaatatgcctatagttcacctcacctccatcctacgtcctatcactgatacaaggggaaatatatatatataatacataaagtcttccttatgatgacttcaaaagaccaagggagggtgkatgggttttttttcttacctcaatattcaaatccctgaggttgkcacaaacaatatcaaatcatgattaaataatgatttaattttcttttgtaagttcttaaaattagkatattaatgataatctgcttgaaatcaagccttattgctcttcccatggaattcgaatgatgmcaatwaattataaacccatcackgtattttcttcattctgtamcatgtcaagatcagcttaatwaattctctgggctacatttgaagtttcttggttaaaaatcagagatccaatgtatcttaaagttaaatttttagatatctaaaaaacatagcatactgcatctgtaaaaatggcatgctgaactttcacaaattattcagaaacaaattttatttagagaaatttaagctaaaaatgcagcaaaccagaaatcagttactgaatgcttcacaatccccagaaaatgagaattatgtaagaaaggaataaaggcaaattttacattgaccctcacagagcaaaattacaggagttctgttctctttgattactaactcagaaataatttatttcaagcttttagcactgaagatgttagttcaaaaaccacatgtttattcttatgcctgtgttgataaaactttgctaaatattttatatgtattaaaaatggagaatgaaagagatgtgtttcaagagccttttacmgataaaycctaacaatcaaataggaaatrgamcattaatgtgaataaaatgctctggcaaggtaggaagaaatgaataactggaagtagagagtccttagcattacaaagtggtaagatttctaaaacagtcatcttgtgagttttttatgcactgttaatagtaacaatacgttccatgaattatgcagttgggatgatttctccttgtgtggattgccagttctagaaatcagtaaaagtgaagaatgagttgaaaaacctatcagcctactgaatctactaaagcctctaaaatattcaatgtctaattgcagcaatttgtatttcataggtgccatatcaaaatcttctccattgaggtcatgattgagtctttaaaaaaaaatttccagatgtgaagatatatatatatacattttaagtttccagcattgtgtgtacaagaaaccaaaacctccatggagggcatgctgatgagttgcatggcacaattgtcatttctgttttgattgcatgtcctatttttgaacctgtaaaagtgtgtagtgcatatatgtgtgtcctatatatggcaatttgtctgatagtgtgtttgagtyctttctggctctttttctagcagagttcaatccacagctttcttcattggagaatttgtgaaataaaagtgagttaatttgtgttacacactctcttaaataacctagacctacaaattgcttgcctaaggctaaaaaatagaaaattcaaagaaacatatgaatgatctcagttggcctttgatgagtaaaaaaaaaaaaaaaaaaactcga

SEQ ID NO: 3055 - DNA, 2163 bp, Homo sapiens
aatggcccagccccacatggcctgcagacagtgctctgtaaatagttgttttaatttagctgaatgttagcattttagtctttggcattttagcgtttgggaggtagattaataaagtatattccttcaagcctgctgttgataccatgaagactgggcgcctcagtcccagccctgtagctgtgtgtcttgggccaccagtggcctgcaggacgaaggtactgttccatcacctgcggtgtgcctcaggatcaccaggtgcaggcccccaccctcggagatgctgctgcagtgagtggttccactgcctggataacccttgaggaacacgtcagttactgtcacgatggggcaggtggagctccttcctattttttggggtgctccctgtttgtaaaggggagtttgttcattgggaaagacctgggtcttgacacggccctgccacttagtcccctaccctctccattccccaggctccacccgtgctgctcaggtgcaaatggacttgagagcatctatgtgctggtgaagcatgaggtctgagtagaaaaggggtatcccttgagaccaccttgggaccagtgcttgcaagcagcgagatatttccccagcaaaaccaggcagctgctaattaaatgcttagaaccaatgaaagctggctgtggtcctgcctgtgagctgcctactgctgccttctgaatgcatatatctgctactgtagccccgggttgtcaaactatggcctgtgggccaaatccagccacagtcggttctttaaagttttatcgaaacacaagcaatggaaatgcccatttccattgttgtctccagttgctctgctccgagggcagtgttaagttgtgcagcagaggcccctccatgcaaagctgaatatgtttactatttgaactttttcagaagttctgcttaaggacaaaataaagcctaaatccaagaacacttttaaaaatgaggaaatagtgaacacaatagacggaagtctggaagtttctacccatgccaagaaaagcattttatgttttgttcacatatgttgtgcaattcaaatttttttccctatattctctgactagacacttgtactgagtcaattggcgagtgtgtctgtctaaaagcacaatatcaaaatatcacttaaagcatctttacatagtgtgtttaagaaaaagttgttattcagcagaaaggtaattccaattggtctgcatatttatcagcacttggtattgtctgtttcttattttagccattctgataggtgtgtactgatatctaatcatggctttaatttgaatttccctaatggctgatggtgaacatcttttcatgtgcatttctgtcatctgtatgtctttggtgaagagtcttcaaatcttttgttcatcttaaaattggattgttatattaccattgggtttaagaatctacatattatggatacaaatatgttgtcagatatgtgttttgcagcattttctcccagtctgtagctkgyctttaaaaaaaaaattttttttyttttttttttttagagatgggatcttgctacgttggccaggctggtctcgaactcctggcctgaagtgatccttctgccttggcctcccaaaatgctgagattgtaggcatgagccgccatgcctagcccagcttgtctttttgtttacttaccagtgtttttcagagaacaaaaattttaatttgatgaagtccaattaattaaatttttaaaatagagtgtgatttttttgtcatgtctaagaaactattgtctagtcctaggtcctaattctcctttgttttcttctaaatgttttattattttacatgttaacgtttagatttatgatctattttaagttttttttaagtatgaggtttatgttttttgtttgtgtttaggagcatatggatggatgtctagttgttccagcaccatttgttggaaagacyatcctttctctgctgaatttcttttatatcyttgycaggaattagccatattggtatgggtctatttctagactttttattktctcccattgatctgtacatctctccttttgccaataccacataagtcaagatgactatagctttgtaataagtattaaaatctggtaatataaaaaaaaaaaa

SEQ ID NO: 3056 - DNA, 1278 bp, Homo sapiens
  misc_feature (23)..(23): n equals a,t,g, or c
  misc_feature (86)..(86): n equals a,t,g, or c
  misc_feature (1128)..(1128): n equals a,t,g, or c
  misc_feature (1168)..(1168): n equals a,t,g, or c
  misc_feature (1194)..(1194): n equals a,t,g, or c
  misc_feature (1220)..(1220): n equals a,t,g, or c
  misc_feature (1225)..(1225): n equals a,t,g, or c
ttttttttttggggggccccaancccccaaaatcaacgggactttccaaaatgtcgtaacaactccgccccattgacgcaaatggncggtaggcgtgtacggtgggaggtctatataagcagagctcgtttagtgaaccgtcagatcgcctggagacgccatccacgctgttttgacctccatagaagacaccgggaccgatccagcctccggactctagcctaggccgcgggacggataacaatttcacacaggaaacagctatgaccactaggcttttgcaaaaagctatttaggtgacactatagaaggtacgcctgcaggtaccggtccggaattcccgggtcgacccacgcgtccggtgctgggcagtgctgccaatcccctggcctgcttcctggccatgggtgtgctgtgcaggtccttggcagggctgggcggcctctctctgctgggcgtgttctgtgggggctacctgatggcgctggcagtcctgagcccctgcccgcccctggtgggcacctcggcgggggtggtcctcgtggtgctgtcgtgggtgctgtgtcttggcgtgttctcctacgtgaaggtggcagccagctccctgctgcatggcgggggccggccggcattgctggcagccggcgtggccatccaggtgggctctctgctcggcgctgttgctatgttccccccgaccagcatctatcacgtgttccacagcagaaaggactgtgcagacccctgtgactcctgagcctgggcaggtggggaccccgctccccaacacctgtctttccctcaatgctgccaccatgcctgagtgcctgcagcccaggaggcccgcacaccggtacactcgtggacacctacacactccataggagatcctggctttccagggtgggcaagggcaaggagcaggcttggagccagggaccagtgggggctgtagggtaagcccctgagcctgggacctacatgtggtttgcgtaataaaacatttgtatttaatgattggcattaaaaaaaaaaaaaaaaagggcggccgtctagaggatccctcgaggggcccaagcttacgccgtgcatgcgacgtcatagctctcttcctataagtgaagtcgnattataaagctaggcactggcccgtcgtttacaacgtcgngactgggagatctgctagcttggganctttgggaaggaaccttactttctgnggggngacataattggacaaaactacctaccggagatttaaaggctctaagggaaaat

SEQ ID NO: 3057 - DNA, 1649 bp, Homo sapiens
  misc_feature (648)..(648): n equals a,t,g, or c
gcggaaatcccggaagtgacagctttgggggtttgctgctggctctgactcccgtcctgcgatgggttgcgacgggggaacaatccccaagaggcatgaactggtgaaggggccgaagaaggttgagaaggtcgacaaagatgctgaattagtggcccaatggaactattgtactctaagtcaggaaatattaagacgaccaatagttgcctgtgaacttggcagactttataacaaagatgccgtcattgaatttctcttggacaaatctgcagaaaaggctcttgggaaggcagcatctcacattaaaagcattaagaatgtgacagagctgaagctttctgataatcctgcctgggaaggggataaaggaaacactaaaggtgacaagcacgatgacctccagcgggcgcgtttcatctgccccgttgtgggcctggagatgaacggccgacacaggttctgcttccttcggtgctgcggctgtgtgttttctgagcgagccttgaaagagataaaagcggaagtttgccacacgtgtggggctgccttccaggaggatgatgtcatcgtgctcaatggcaccaaggaggatgtggacgtgctgaagacaaggatggaggagagaaggctgagagcgaagctggnaaaagaaaacaaagaaacccaaggcagcagagtctgtttcaaaaccagatgtcagtgaagaagccccagggccatcaaaagttaagacagggaagcctgaagaagccagccttgattctagagagaagaaaaccaacttggctcccaaaagcacagcaatgaatgagagctcttctggaaaagctgggaagcctccgtgtggagccacaaagaggtccatcgctgacagtgaagaatcggaggcctacaagtccctctttaccactcacagctccgccaagcgctccaaggaggagtctgcccactgggtcacccacacgtcctactgcttctgaagcccgcactgccaccgctcctgccccagaaggttgtttagtttccacgtaggcaggtcgctttgtgcctctgagtgcgctgctgtgtgttctctctatagttctgtgtcataaagctgtcctggccagccttcaagctggtgtggccactcttgatgtgaggcgtgtcggttccaggggggacatgggaggggctgcacagtggcccgaggtcatgcttgcttccacctgcaggtgcatttggtcctttccatggccaggaagccctgtgggctgcactttttatgcttgcagtaacaagagactccagagtcctcaccggtgcagagttggcacatattaattaactaaaattctaatgatcttgctaccagcaataaatcaagtaggccaagtgaaactgggctttaaaaaggatggatttcaaatacactgtgcccactagaagcttcgaagggcctcgtccctctgctacagccctgggaggagccaggatccttgttggtctagctaaatactgttaggggagtgtgccccatctcatcatttcgaagatagcagagtcatagttgggcacccrgtgattgggttcaaaaataaagctggtctgcctcttctcaaaaaaaaaaaaaaaaaaaaaaaaaaaaaaaaaaaaagggcggccgc

SEQ ID NO: 3058 - DNA, 1727 bp, Homo sapiens
agaaaactgtgttgtgcttttggagaacagattctccatctgtatccgaaggacttggtaatggaagcaggctggctgttgaccctgtccattcctggggcacattcacaaccccaaggacaagccgtgtccttggtagaggggggtggtaggtgaaatttttaagtctagccctccagcgctctcccacaagggggcggcagtctaccctcttcacataaagaactgcgtatgaaatgcagcctgctacagggtaaaaggcagcacctgggaagacctgaattgtacttccctccttgccgtgatttgctgcctgttactgcccctcatcamtgtcttgttctatccagcatttcttcatctatgaaaatagaagactggattggatgactgatgacatccactgtggatagctacactgctatcctggcgatgaggccatacagttggtgaaatgtgtgtaacacacccaaaaaatgtgccccagatgtgttgggttctctttttttctccaggtctgcttttcttgtctctactctgccccgactttttttctttcttctaggtttagaagccaagcccacagagactttgtgagagatgcgacttggtccccgctcaatcactccctgcttaccacagtgggctgggaccatcaggtcgtccaccacgttgtgcccacagaacctctcccagcccctggacctgcaagtgttactgagtagattggatttaagacaaaaagcaagtcccccatgagtgtccacttctttgccctgccctctcagcttgtgagacaacacaggagccttctatagtatgttgatatgctagatctgtgccgttaataggcatcgtctctcagcctgagggaggctggattctgggttcctgtagtcacagggaggaaaagctttcttaaaaatggacatgtatgtgcgtgtgagtgtgtgtgtagatttatagtttttggtagtggcaggaataaaaaaaatccatcctacatcttccctaagcactgcctctctctcaccccccaaaacaagttgacgaaagggttttatgtagctgtctatgaggaattggccgtgtctgggtgggttatgggatgtgggcatccctgggttcttggaagcagctcttatgctactcatagagatgggattgactttatttttttatagtgcttaattcaccattatgagaaatgcttccagtcacaaaaatgcagcccagctcactctgaggaagaagcaggacttggtacggttttacacaactccttaccattaaactgaatcagaaatccattttctggctgaataaaaagtttggcttgcctgtgtaatgcccactcccttccccctggctccctagtgatgggacatatatgagagagaagtgtttttctatcatagacaccataggggaaagtttggggatgaaggagagcttaaaggtgtttcaattaagttagaaaactgacacaggctgttgagaattctttgccacttttcccaccccaaaacagcatggggcctgacatcttctgccctggtcccctttctcttgatgtggaaagtctgaatgcagtatttatagacttctaaggttttaaaatccagtatcaagaagaaaatcagaaatactggttggtgaaataaagagtttaggcattgttggcctgtcttttttgaaaaaaaaaaaaaaaaaaaaagggcggccgc

SEQ ID NO: 3059 - DNA, 2314 bp, Homo sapiens
acccacgcgtccgggatttctctgtattataaaattagtatataggttgcatagttgattcatgtgcataatttatagtttaaaagtaaagtggtcagtacatatggcttagctctatgtgttagtttttaaaaaaatctacattgttttgagtgtttggttattaatagtttatggatataactgctgcacagtagtaactccttcatctactggaaggaaggtcaatttttcagtcattagaaataggtagctaaatgagatgcttcttatttttgcttggaggtgccaggtttatttgccaactttccacagttagaaagcactttggatcaccactgtcagatatttagatttctttttgagtctggaggattgtatttcttatcaaaacaaatatccaagtttatgctttaaaaatatttaagtttttattaattgcagaatatgagaataaaggaacgaccaaatgctgtaccatattgcctgactcactctgccactaaatggagccccacttgatcctcacctggctttctagattatttatttcctgtatattcccctacattttagtcatatctaacaacttactgggtttttttttttttttttggaaaattttgtaccctttctggcttctccactctatgcttttctcaccactttaaatgtccattttccatatgtcactgttcaatctcagtgcattaaaataatctttatcctttaaggccctgctcaagtactatacaaaaaaatacaaataaacctctttcttctgcttctttaagccgttagtacttattgagtcttgttgtagttatcttagcttcctctctggagcataagcttctggaaggtgtgaatcatgtcctgtacagatctgtgttttctgtagggcctaggaccattcttgtcagaacttgccatttaaagaatggcagatgactgcttcccagagactacacttgacaggaggtctaggcaggtcctagcagtaagggaatgcccagaacaattgagctgttggtttcaggaaaggctaggatgaatgccaggcacacgttctgcaaggcccacagaacatggtatgaaggaggtcttattgtttgaaataggtaaaggtctaatctgtgaatggtcactgtcaggatattcagggatctagtctgagatgcttggttttgtatctgaattctgaattccaaggtctgaaagatctcagagtggggtgagataggaatcaggactaggaaaaacgagtgtgtcagacatgaacttggtgtgagtggggaggagtgtgtggagaccagacagagactagtttggcaattaagtctaagttagaggctcgagcaacagggaataaagtgagagataagtcctggagttaagatatgatattaaaacatgacaggcagttagattaaattgacttgaagctgatttgctaagctgttgactgagtatacttaaatttcctttccttagagcccagttcattcctagttctaggtaaagtcgtttggctttctgtaaaggggtaggaacctttttattccttaaaggtatgactatctatttgccaattaattccatgttccaaggatcccctcatggagaaaatgttgcactgagttaaataaggaaataactggacgaatacttgagattattcccttcataagaataattactaattgtgaattgatggtttgaataccatgctaaaatgattgaacctcttttctcttgtgaagtgattgtgaagttacttgtacctttatgtttttaaaatttgatgataatagcaataaaagctttagtgcttttatgatctctttatttggtttgtagttatggcacatcagaaactcgcatcaaaatagaatcaagattattgtaaaagggacctcaaacgtagatttcttaaaaaaaaaatgttttttattttcaagatggaatcttgctgtgttgctcaggctggtctcaaactcttggcctcaagctgtcctcctcaccttagcctcctgtagtcccagcactttgggaggctgaggtgggtggatcacgaggtcaggagttcgagaccagcctgaccaacatggtgaaaccccatctctactaaaaatacaaaaattagctgggcatggtggcgcactcctgtaatcccagctactccagaggctgaggcaggagaatcgctggaacccaggaagtggaggttacagtgagctgagattgtgcaactgcactccagcctgggcgacagagcaagactccgtctgaaaaaaaaaaaaaaaaaaaaaaa

SEQ ID NO: 3060 - DNA, 1161 bp, Homo sapiens
  misc_feature (1)..(1): n equals a,t,g, or c
  misc_feature (899)..(899): n equals a,t,g, or c
nggccccccccgggtcgacccacgcgtccggttcattcccacttcacaccttggtcctgctgattagagagctcatcagaggggcctggaaaggctgagcaagtaccagtgacaatggccatttaagaattctcaggccccatgtgccagccttcttgggaactgagctggctttctgggttttctcatgcctggtcttactgcttcttcctcagggctcttgttctcccagaagcctcagggtaatgtgttggttagcacgtaactactaggattggggccctagggattatagccaggactctaatctgcctaccatgccatttaacaagagatcccactctccagctgccttgtgtccctagggtcctggccatgtgtttagtgtgctaaactttctcctttgttctcaggccttccaggtagtccccttcctggacttaagagtgcaaactcttctctgtggttctagccttgggcagaattatatcccagagaccacagagcaactgtcaagctgcttaccccctcacccagggctacagcctgtgcccagccctctaatttgtgcctctcttgtgttgggggtggtgggggttattcctttccctttcctgctctggcctccttgaaagttcagagtacccagtacaagtcagctttaaagtacagcttttagtgtttcctgggttgtttctctggggctttagtgagggacctttgccctctggtttttcttgcctcctggtttagggagcatctcacacttgttagtatctggttgttgggccagccgtgcctcctctagatctggagccaggccaggcaggggcmacgtgtgggcmagtcagccactacaagatttttgctaagctttgggctgttggcagcatcttggncctcatgcctgggcctgaatgaggctctttcttaagtgtttttacaagtttgtgttttatttatggagtgacttatcccttccattcagagcagccccacccagccaccatgctgacgggtatttttcctcataaagtttataaccagttatttatatgaatctttgttatgtccatttgtttgtattgcgtattttgattataaaataaagtatcttaacagacaaaaaaaaaaaaaaaaaaaaaaaaaaagggcggccgc

SEQ ID NO: 3061 - DNA, 1462 bp, Homo sapiens
ccacgcgtccggcggcggcggcggcggcagcgccaggagctgctacagcagaggcggaggttgctcctgtacgcgtacgggccgctcggccggagccgcagcccggaggcgccgggcggtgcgctgggagctgctggtgctgctgctgctgctgctgcccaccctccgccgcccgggcccccgctgccgcccgggccccggctgccgtctgcgcccccgtcgaccccgcccgcgagtgcgccccagccaggacgccgcccccggccgggtctccacttcttggccgcaccttccatgacagcgcccgcgagaagatggctgcgaagggcgcgcacggctcctacctgaaggtggagagcgagctggagcgctgcgcgccgagggccactgggaccgcatgccggagctggtccggcagctgcagacgctgagcatgcccggcggcggaggtaacaggcgaggcagcccgagcgcagcgttcacctttccggacaccgatgactttgggaaattgctgctggctgaggccctcctggagcagtgtttgaaggagaaccatgccaaaataaaagactccatgcctttgctggagaagaatgagccgaagatgagtgaagccaaaaattatctaagcagtatccttaaccatgggaggctctcggtaagtcgtcagccttcaagcctgagacctcctctcctcgtctgtcttgcctcgcatctgtccagtcctccctgagtcatttggtcacctgagcaacaagtctctcttacaagctgcccttgcacttacagtagccactggctgcacatggccccttgagcacttggagtatggctagtccacattgagatgtgctgtaagtataaagcatacacaaggtttcaaagacttagtacaaaacaaagaatagaaaagagcagtaactttttatgttgattacatgttcagatggtatattttggatatattgggttaaataaaacatgttattaaaattaatttcaccttttacctttttcagtgtgactaaaaaaaatcttagtagaaatttttaaattacacatgtggttcacatttgtggcttacatcatatttttttggacagtgcttggttgacttaatatgtgcctggccctttgggctccttgggtcagggggctctcaggaaaataaaacctcagtgaacctgtgacctagttagaaacaggcaaacatgcagagttggctagggacagaagagctccataacagggcaagcccatttaagtccacgtgtatttatcaagcacctactgagtacaagacactgagggaggtagaggacccacctctccctcccagaaggagtatggtcacaactttctctggactttgctgctcaaaatgtggtccacccaccagcagtgtaggcatcattggggagctggttagaaatgcaattaagagaaaaaaaaaaaaaaa

SEQ ID NO: 3062 - DNA, 2393 bp, Homo sapiens
ccacgcgtccgatcagaatatttatgcctgatggttaattttagacatctacttgactggattgagagacacacatagctggtgaaacacaatttctgggcatatctgtgaaggtgtttctggaagacactgagataaccctgacccagtgtggatgggcactgatatggtttgcctgtgtccccacccagatctcatcttgaaattgtagttcctataatccgtacatgtcgtgggagggacccagtgggaggtgattgaatcatggtggttgttactgccattctgttttcatggcagtgagtgagttctcatgatccaatggtttcataaggggctgttcccctttggctcagcacttcttcttgttgctgccatgtgaagaaggacgtctttgtttccccttctgccatgattgtgaggcctctgcagccacgtggaactgtcagcccatttaacctctttgctctttataaattgctcagactcaggtatttcttcacagctgtataaaaatggatgaatacacggcaccatccaattggttgagagcccagatagaataacaaggaagaggaaaggtgaattatctcctgaaattgaaacatccttcttctcctgcccttgacatgagaatcagtgtctcacagctttggcctcagaatcagaggtacaccattggcttccctgattctgagtcctttatatctggagtgagtcatgctgccagctttcctggttctccaacttggagacaggctattgtgtaacttctcagcctccataattatgtgaaccaattcccctaatgagtcttctctcatctatctacatatatcctattgattctgcctttctggagaaccctgactaatgttattacaataatacaaaattcactagtttatatagaagacttggtttttgtctttgccccattttgtatttgtattataactgtgtatctggaaaatggaacaagtttttatcttcttcatatgagggccaaagcttttttctcaccaatatttttggagatttttaagattttcttttgtttggacatacaatcttatggaggctgagaaataaaattttttctattttatttttcagccccagatgtttgcttttgcagattcttgagcacattgagagcatggagagcactccaaggcatggagtggggtgcctaaagtttcagtgattacagggagttgagagactcaactgggaaaggaaaagtctaaaaggaggcaatttggaagataaaaattttctcaaaggagcgattaaatttctaaataattcttagtaaaatcatgtaaacaggaaaggaaatagaattaagttccatattggtggaacacatagcagaggtttgagaagggagaatttagtcaactgagaagttctcatgaaaggagcaagtgaagatcacagagacaccttgaaacaaaaagccaggaataacttccaacccaagaggagaacagagaggcctcaaaaccaaagctaggataagaaacttgtagcccaagagttatcttccagacaaagaagcctgagattccaacgcagcttcagagagtactcactcaaaatgttactgaaactgaaggctttttaatgacttagccatgcatgcaaaaggcattccctaaggtggcacagaagacggagcccccatatccaaagatagccaaggagaaagaaagacccctgttgccagagccagtgggcaaaggcaacagaaaaggagacaagggtcctaatgggatgagatcctttcggatttaggcttttatacaaactcctgagaactggcagggtgacagccataaatggggtaccaacatttctactcattggattacaagttctcaggcatccaaaatgatgaacaaaatggacaatttctagggcttctgtgggaaagtatggaaaggtctttttgaaccttttaatgctgtcaacggaagaatgatgaggttcataaatttggaaaggagacatttcttcatttttatgtttatttttatttttttttgagacagagtttcactcttggtgcccattgcacaccagcccgggtgacagagcgagaccctgtctcaaaaaaaaaaaaaaaatgggagaccaaggcgggcagatcacaaggtcaggagtttgagaccagcctggccaatgtggtgaaaccccgtctctactaaaaatacaaaaattagccgggcatggtggcggtcacctgtagtcccagctactcgggaggctgagtcaggagaatcacttgaacccgggaggcggaagttgcagtgagctgagatcacaccactgcactccagcctgggtgacacagtgagactccatctcaaaaaaaaaaaaaaaaaaaa

SEQ ID NO: 3063 - DNA, 2193 bp, Homo sapiens
aaggtacgcctgcaggtaccggtccggaattcccgggtcgacccacgcgtccgcawagacattgaacagtaccaggttcattggctttgctcaggcttgaagccgagtggagttgctcaggggtggccattagtctggtccttgccgcttcactgcatgccgggcagcttgggtggctatccccatgtgtggttttaacacatgtggaccgatgggcttctgtctcagtagtctgctcgcatggtgtgttgactgtttcttctctctgtgtagctttggtgtgaagcttatggacttccaggcccaccggcggggtggcactctaaatagaaagcacatatcccccgctttccagccgccacttccgcccacagatggcagcaccgtggtgcccgctggcccagagccccctccccagagctctagggctgaaagcagctctgggggtgggactgtcccctcttccgcgggcatactggagcaggggccgagcccaggcgacggcagtcctcccaaaccgaaggaccctgtatctgcagctgtgccagcaccagggagaaacaacagtcagatagcatctggccaaaatcagccccaggcagctgctggctcccaccagctctccatgggccaacctcacaatgctgcagggcccagcccgcatacactgcgccgagctgttaaaaaacccgctccagcacccccgaaaccgggcaacccacctcctggccaccccgggggccaragttcttcaggaacatctcagcatccacccagtctgtcaccaaagccacccacccgaagcccctctcctcccacccagcacacgggccagcctccaggccagccctccgccccctcccagctctcagcaccccggaggtactccagcagcttgtctccaatccaagctcccaatcacccaccgccgcagccccctacgcaggccacgccactgatgcacaccaaacccaatagccagggccctcccaaccccatggcattgcccagtgagcatggacttgagcagccatctcacacccctccccagactccaacgccccccagtactccgcccctaggaaaacagaaccccagtctgccagctcctcagaccctggcagggggtaaccctgaaactgcacagccacatgctggaaccttaccgagaccgagaccagtaccaaagccaaggaaccggcccagcgtgcccccacccccccaacctcctggtgtccactcagctggggacagcagcctcaccaacacagcaccaacagcttccaagatagtaacagactccaattccagggtttcagaaccgcatcgcagcatctttcctgaaatgcactcagactcagccagcaaagacgtgcctggccgcatcctgctggatatagacaatgataccgagagcactgccctgtgaagaaagccctttcccagccctccaccacttccaccctggcgagtggagcaggggcaggcgaacctctttctttgcagaccgaacagtgaaaagctttcagtggaggacaaaggagggcctcactgtgcgggacctggccttctgcacggcccaaggagaacctggaggccaccactaaagctgaatgacctgtgtcttgaagaagttggctttctttacatgggaaggaaatcatgccaaaaaaatccaaaacaaagaagtacctggagtggagagagtattcctgctgaaacgcgcataggaagcttttgtccctgctgttaatgcgggcagcacctacagcaacttggaatgagtaagaagcagtgcgttaactatctatttaataaaatgcgctcattatgcaagtcgcctactctctgctacctggacgttcattcttatgtattaggagggaggctgcgctccttcagacttgctgcagaatcattttgtatcatgtatggtctgtgtctccccagtcccctcagaaccatgcccatggatggtgactgctggctctgtcacctcatcaaactggatgtgacccatgccgcctcgttggattgtcggaatgtagacagaaatgtactgttcttttttttttttttaaacaatgtaattgctacttgataaggaccgaacattattctagtttcatgtttaatttgaattaaatatattctgtggtttatatgaaaaaaaaaaaaaaaaagggcgrccgc

SEQ ID NO: 3064 - DNA, 372 bp, Homo sapiens
acgcgtccgcggacgcgtgggcaacaccctcctagccttactactaataattattacattttgactaccacaactcaacggctacatagaaaaatccaccccttacgagtgcggcttcgaccctatatcccccgcccgcgtccctttctccataaaattcttcttagtagctattaccttcttattatttgatctagaaattgccctccttttacccctaccatgagccctacaaacaactaacctgccactaatagttatgtcatccctcttattaatcatcatcctagccctaagtctggcctatgagtgactacaaaaaggattagactgaaccgaataaaaaaaaaaaaaaaaaaaaaaaaaaaaaaa

SEQ ID NO: 3065 - DNA, 2731 bp, Homo sapiens
  misc_feature (579)..(579): n equals a,t,g, or c
  misc_feature (1532)..(1532): n equals a,t,g, or c
  misc_feature (2362)..(2362): n equals a,t,g, or c
gctggggaaggtgcagggggcctgggagactgcctctccgaagcggtgaaaccctcacccttccgtccctcccagccaccctccctaaaacttcccctgacagagggtggcagccccaggctctttgcataatcctgtggcttcgctgtcttcacccagcaccagcggacagggaagggcagagaaggccaccatggcgacactcctctcccatccgcagcagcgccctcccttcttgcgccaggccatcaagataaggcgccgcagagtcagagatctacaggatcccccgccccaaatggccccggagatccagcctccatcccaccacttctcccccgagcagcgggccctgctctacgaggacgcactctacactgtcttgcaccgcctgggtcatcctgagcccaaccatgtgacggaggcctctgagctgctgcgatacctgcaggaggccttccacgtggagcccgaggagcaccagcagacactgcagcgggtcagggagcttgagaagccaatattttgtctgaaggcaacagtgaaacaggccaagggcattctgggcaaagatgtcantgggttcagcgacccctactgcctgctgggcattgagcagggggtargtgtgccagggggcagccccgggtcccggcatcggcagaaggctgtggtgaggcacaccatccccgaggaggagacccaccgcacgcaggtcatcacccagacactcaaccccgtctgggacgagaccttcatcctggagtttgaggacatcaccaatgcgagctttcatctggacatgtgggacctggacactgtggagtctgtccgacagaagcttggggagctcacggatctgcatgggcttcgcaggatctttaaagaggcccggaaggacaaaggccakgacgactttctggggaacgtggttctgaggctgcaggttctgacgctcacgggctgggcatccccgcctgtcaggacctgcgctgccgagaggaccagtggtaccccctggaaccccgcactgagacctacccagaccgaggccagtgccacctccagttccaactcatccataagcggagagccacttcggccagccgctcgcagccsagctacaccgtgcacctccacctcctgcagcagcttgtgtcccacgaggtcacccagcacgaggcgggaagcacctcctgggacgggtcgctgagtccccaggctgccaccgtcctctttctgcacgccacacagaaggacctatccgacttccaccagtccatggcgcagtggctggcctacagccgcctctaccagagcctggagttccccagcagctgcctcctgcaccccatcaccagcatcgagtaccagtggatccagggtcggctcaaggcagaacagcaggaggagctggccgcctcattcagctcctgctgacctacggcctctcctcatccggaggttccgctctgtcttccccctctctgtctcggactccccagcccggctgcagtctcttctcagggtcntggtacagatgtgcaagatgaaggcctttggagaactgtgccccaacaccgccccattgccccagctggtgactgaggccctgcagactggcaccactgaatggttccacctgaagcagcagcaccatcaacccatggtgcagggcatcccgraggcaggcaaggccttgctgggcctggtacaggatgtcattggcgacctgcaccagtgccagcgcacatgggacaagatcttccacaataccctcaagatccacctcttctccatggctttccgggagctgcagtggctggtggccaagcgggtgcaggaccacacgacggttgtgggtgatgtagtgtccccagagatgggcgagagtctgttccagctctacatcagcctcaaggagctctgccagctgcgcatgagctcctcagagagggatggagtcctggccctggataatttccaccgctggttccagccggccatcccctcctggctgcagaagacgtacaacgaggccctggcgcgggtgcagcgcgctgtgcagatggatgagctggtgcccctgggtgaactgaccaagcacagcacatcagcggtggatctatccacctgctttgcccagatcagccacactgcccggcagctggactggccagacccagaggaggccttcatgattaccgtcaagtttgtggaggacacctgtcgcctggccctggtgtactgcagccttataaagrmccgggcccgcgagctctcttcaggccagaaggaccaaggccaggcagccaacatgctgtgtgtggtggtgaatgacatggagcagctgcggctggtngatcggcaagttgcccgcccagctggcatgggaggccctggagcagcgggtaggggccgtgctggagcaggggcagctgcagaacacgctgcatgcccagctgcagagcgcgctggccgggctgggccatgagatccgcactggcgtccgcaccctggccgagcagttggaggtgggcatcgccaagcacatccagaaactggtgggcgtcagggagtctgtcctgcctgaggatgccattctgcccctgatgaagttcctggaggtggagctttgctacatgaacaccaacttggtgcaggagaacttcagcagcctcctgaccctgctctggacccacacactcacagtgctggtggaggcggccgc

SEQ ID NO: 3066 - DNA, 2783 bp, Homo sapiens
gacccacgcgtccgcacaagagagcagaggagccccaagtcttggggaccacagaagatgccatgtgctccacgatgtcggcccccacctgcctggcccacttgcctccctgcttcctgctgctggcactggtccttgtcccctcagatgcctctgggcagagcagcaggaatgactggcaggtgctacagcccgagggccccatgctggtggcagaaggagctggggaccctgaaccagacctgtggatcatccagccccaggaattggtgttggggaccactggagacactgtctttctgaactgcacagtgcttggagacggtccccctggacccatcaggtggttccagggagctggtctgagccgggaggccatttacaactttggaggcatctcccaccccaaggcgacagcggtgcaggcctccaacaatgacttcagcattcttctgcaaaacgtctccagtgaggatgcaggcacctattactgtgtaaagtttcagaggaaacccaacaggcaatacctgtctggacagggcaccagcctgaaagtgaaagcaaaatctacctcttccaaagaggcagaattcaccagtgaacctgcaactgagatgtctccaacaggcctcctggttgtgttcgcacctgtggtcctggggctgaaggcaattaccttggctgcactcctactggccctggctacctctcggaggagccctgggcaagaagatgtcaagaccacaggcccagcaggagccatgaacaccttagcatggagcaagggtcaagagtgaggggtcagccccagagtgaggaccctctgagttggagaggagccagggctcctcaaccatttccctacctccagtcccagcctctaggtgcccccaggcctcatgacaaactcctagatccctacatctggttttggtccacctagtgaaattcccttctttgcaccgggcttccctctaaaatgtctccctttctctttttggcctgttcaagacctccttgcttttcagtccctggctcagtctctcctcaacacccttgcccctgctgcagccctttctggtgcgccctgcccctttccccacctcgctacatccttcttggcctccaacatccaactcagagtcttcttcccaggagatgtctgtaagaatctctgaactcaaccagccagaccatctgtgcccctccatctacacctttctccccactccttcctgccttccttccatccccctcatggctggcttgggcaggtataatattagaatgcaggttcagcaactataacaaagctcttaaataacagtggcttaaaccagtggaaatcaaccagaaagttgaccatcagcaggccaagcaatacagagactccctggtattgagacccaggattcactgatctcattgctaccaggtccaccttctaggcagccagactggaaaagaaggcaggaaagggggagcaggaccctcccctttaaagtgcacagtcaggaacttggccacctcacttatctctacttggctggaatgtggtcacatggtcacacctagctgcaagaaacactgggagatgtagtctttatttctggcagcaatgcgcccagctgcaagttttcactagagaaaccagatggcagatatcaggggataaccagttatctccaccacagcagcatacagacagcctctcacctgccctgtgggacacctgagttcaatgcccagctagctagccagcacttcttcccactatcacctcccctggggcagcatgatgtggggcagtagttcccaagatgagtgattttgcccccactggacttttggcaatgtctagagatgtttttggttggcacaacctggggggtgctaccaccatctagtggactgagaagccctgacatggggaagagtgtgcatgcccaggagtcagacacacctgcctttaaccctgaggcctctgcctcctccctgtgcaccctcagtgactaatcagagtcccttcccatcacggaacatccaggatactaatgtggacttctctgcattgtgtaagaaccaattcaagaccaggcacggtggcttatgcatgtaatcccagcactttgggaggccgaggtgggtggatcacctgagttcaggagtttgagaccagcctggctaacatggtgaaacctcgtctctactaaaaatacaaaaaattagccaggcgtggtggtgtgcacctgtaatcccagctacttgggaggatggggcaggagaaccgcttgaactgggaggcagaggctgcagtgagctgagatcgcgccattgcactccagcctgggcaacaagagcaaaactccgtctcaaaaaaaaaaaaaagaaccaattcaattctgcatttactgagggcctactatgtgctgtgtgcactgcgtgcactcgatacatgtaaattccctgttctctttccaggcaaacatttattagcactcactatagcggcgagtagatgagtctagatgtttttcattaccacaaacagaaaaacagcttgaactaagccagcgacaacagtaatttagtctgagaatggaataaattattgaattaccagacattagagagggtagggaaggtaggctgaatactaacccccaccccaaagatatccatgtcctaatctctggaacctttgactgttaccttgtatggcaaaagtaaaaataaaaagaaaaaagaaaacaagaaaaaaaaaaaaaaaaaaaaaaaaaaaa

SEQ ID NO: 3067 - DNA, 625 bp, Homo sapiens
  misc_feature (623)..(623): n equals a,t,g, or c
ggaacttctgagctccagtgatcctcccaactcagcctcctgagtcgctaggaccacaggctatcatttgctttctgtcaggaaatacacagggcagatcacatcacttttcattggaatgctcatctgcaggcacttgatgttgtgtatcagtgttttctgtctgctgatgactctcctgttccccttcgttcttgtagttttgtatatktkactcaccttcagatcatcttggcagtattgctttctccacttcatttgggatctttccttatttctaattgatcatgtttgccactgttgacagtggcagatccgcatgcgttatttatttcaagaaccctatcccacttctctgcatgcctgcatatattagcctcataaatcaccaagaaaataaagatcttaatgtactctttcaactagctgttgttcagcaagacaccctaaggagagtgaaaactaaagaacaaactggggtaagatatttgttaaaataatatataacttcatataattgtaaaaagattaatatytagactatatattttttaaaaaccctgtgactcaagttataaaaagacaacccggtagaaaagtraataaaggacttaagcatttcnta

SEQ ID NO: 3068 - DNA, 831 bp, Homo sapiens
acgcgtccggtgggcctccttagggagacaggtgaccctgggtgccacccctgccccgtgtgtgccccgggtgttctcagtggttgctgaaggcaggtagagggtgctgtccagtatcccccatgtgaaggtcacttcccttctcatggagtcagctgagcatcagctcagccctgccatgtccccactcaccctcctcgcctcctgtccggccctgggtttctagcggtgcctgaggcatcactctggcccattgacagatgagaggtctgaagccttcctggccacaggcatcactttctcctcctcctcatgccctgccttgtccttgtcgtgttgccatggggttctgagaggctgggagttcacagacctcagacacagctgagtccgacaaccattggggtggggctgcatcagtctccggagtggcccgccacctcctgaagcagggcctggcccacccaaggtccctggggcaggcgggcaccgtcattcgctgccattggcttctcagatgtatttcaaggactaagtgggctctaagatctaagatggcccggcgcggtggctcccgcctgtaatcccagcactttgggaggccgaggcgggcggatgagttgaggtcgggagtttgagtccccgtctctactaaaaatacaaaattagccggacaaggtggcgcatgcctataatcccaggtactcaggaggctgaggcaggagaatcacttgaacctgggaggcagaggttgcagtgagccaagattgtgccactgcactccagcctgagcaacaaaagcaaaactctatctttaaaaaaaaaaaaaaa

SEQ ID NO: 3069 - DNA, 1468 bp, Homo sapiens
  misc_feature (561)..(561): n equals a,t,g, or c
gcttccatatcagaagccttgacttaggagtcagacctgggttcaaagcctagtttcatcatttcttagctatgtgactatggggtgtttacttaacctctctgagatttctttccttgatttataatgtggcatgaacaatacctgccttgcagtgttgcatgtggtgatgtgtcttgcttggagcttcctgtggagtttgctccttcatgggttcattcactcctttttttcattcatttcttcatgtgctgttacatgtacctaggaacatatagcttagtagcttagcagcttagcactaggcgctgggcacaaaagggtggagagggtgtgtgcttagccttttgwggctggtaactctgggcccagagttgaggggaatgatttgactggcgaggcagactctgcttggtcccattgtaaaccagtcatagaagagatgcctgtcctgggtaggggccctctcttccttccggtagtgctctgagcattgcctggatgacaggcctattgagcagtagcctgggacttgggagggaaactagggctggagagcanctctgggaggcattggggagggcgtaggtggatgagtcaccatcctccctcaaggacgtcttgggcaagttgtctggccccattagccagcaaccagggaaatgtagctgcaggaaaatcacctcgtttcctcgggatgttttttcttaggctggtttcctttacaagctgcaattatgttccatcccacgcaattcagtaagtggcacttttcagagaaactgtcttggtgatcatttgggctgctgtgggccagggagttgaggagagaagggagtgagagcttctactgagtttagttggttttgtgtccatgagccatttacaaactttgcacctgattgggctcagttgcagtttcttgtatttccctaccagccaagctgttgaagctgctgagcccggaatgatgttatcactgaggcagatgacaaaccctctagttgctagaaaccaaactgctccccgagctggtgtttccgttttttgtactgactgcttatttgggcttgatatataatggtgaaaacaggaactgtttattttaggtgataagaaaccaacattatgacaagaagatgtcatcttagttactctgttaccagtaccataggccagatactatctagatgcttataaacatcttatctaatccttgtaataataagccccaagctaggttttatatccccattttatggatgggggaactgaggccaataacttcatataacttatccaaggccacaaaactagtaataaacagagtgaaattcaacccaaaaacaaactacaaatccaaatttctttacctctatgctgtctgtacttgctgttactagcaaagttctcttggtgggagttaccccatcccctctccaaaaaaaaaaaaaaaaagggcgrccac

SEQ ID NO: 3070 - DNA, 1411 bp, Homo sapiens
gtttcaatccaaatgttgatttacttattctgacacctcatgtcctcttttagctctgcacttttctgccctttattttttggttcacacttttttctaagtatatgggttcagatggccttttacatgattgaaaactgtaaaggaaaaaggtagtagtcaacagtacaatcatggctttaataaccctttattttatgtgacaccaaaaagaattgaaaaatacaaggattgcaatttttaaattatgacgtaggcagctttgaatacatttatgtgttttccctatcaaatgaaaatataaccatatattgtatatatatatatatccttaaaaattggtttttcttacttgaatgttaatttttaaaaatttataatggcattgattaatgttgatgtgatttattgaatctaattcatgtaaaaatgatatattgtgaactgtgatactttcattatcacatcctgtgacatacatggtagttatatgttgaatgttgttgactgacttttattgactaggttactaaattttatctgaatttcatcttaactytgtggcctttatatctcctaagacatctttatatacactttgaaagattaaagaatgtggaaaatatagttgaataaaataactatgatggtgggataattttactaatgcaaataaaatttattcgaagttaatctagaaaaaagttagtgtttatctagggtctattccagtcttccagaagagttctttgtctggttaacacaactgctgtcccactgcctactagggttaattaggttgaccagcctggctagtgagtatctgcttcttccatttctgcttgtggtttctcctttactcattgtgtatttggtgaagagggcagcttcccatatggagggggaccttcagtctaggcgatacyggaarttcagcttccactaatacataaattctggtttcattgacctaatataataaagttaaatccacatatctgggtaaatatctttttcctcgtgccgaattcggcacgaggtcaaattaaggatataaactttccacaccttcctgtcgtgacagataaaagcacagaaaggacaacccttgaaatcatgtaacgttggtcatttcaatattttgtacctgttttaaattctgttagtgtatttacttcattgtaaatatttttgagggtacctttgtattttgcttttgaccttggttctgtgatttggatgtcaacaacttccctaaaaagcaccagtgtgttaggttctaatgtcatgacccaatttgtgttattcatctttaatcctgttttcagtctctatgtgtacagcagtatttttaataaagaattacagagataaatttgaaaaaaaaaaaaaaaaaaactcgcggcacgag

SEQ ID NO: 3071 - DNA, 875 bp, Homo sapiens
  misc_feature (521)..(521): n equals a,t,g, or c
tcgagttttttttttttttttttaaatgaaaaactaacttgggaaatacattctttgatggggctagccacacatatgttttacaatacttggtctgcaatgctgtcttttgggtctgagtttcttctcaggagggtatctttgggccagcaataacaatcattgttcagttatacaaactttataatttctgaagtaatttcctatacatcatttcacttagtctttacaaaaaccctatagagaaagcagggtaaagtctgaaataataaataataatcagttaatggaaatagagtatctacatcctggaaatgatggctatgttatacactatgctagctctagacattcttgtatgtggatgaaattagcttcaatacaaccatatgaacagattgggtccagaggcagagggaggcacacacagatcatttgacttgcgtgcttcagatgaggaaacacgcatagagggttaagtggcttgcagaagggcaaccaytaggcaggggtagagcagnacttgaaactacacacacccaacaaatagttcccatatgtgcctggccttggggtagggagacagatgcaagaccagtaggcccttcctccaaggagctaccagtcctgcaggagaaagacatccctcattattcaaataatacattttcaaattacaatagcaagaagtgccctagaaaagaaaagagatctggggtttcttccacttgtgtctacagccacaagccctggccccagctccctgctctctctcctctgatgcaggattatacttgcagtctcagacacccaagcaagggttattcttgggaaggggcaaccacacggcttctaatccttctcgtgccgaattc

SEQ ID NO: 3072 - DNA, 1026 bp, Homo sapiens
ctatcagcaaagaggattttgcaaagccacagaacaatgtgtgaccagcagaagcagccacagttccctccatcttgtgtgaaaggttcgggactaggggctgggcagggtascaatggtgcctctgtgaaatgcccagttccatgccagacccaaactgtctgtgtgacrggccctgctccatgccctactcaaacttatgtgaagtaccaagttccatgccagactcaaacctacgtgaagtgcccagctccctgccagaggacctatgtgaaatacccaacaccctgccaaacctatgtgaagtgcccagctccctgccagacaacctatgtaaaatgcccaactccctgccaaacctacgtgaagtgcccagctccctgccagatgacctacatcaaaagtccagctccctgccagacccagacgtgctatgtccagggtgcttctccttgccagagctattatgttcaagctcctgcaagtggctcaacctcccagtactgtgtcactgacccatgctctgctccctgttccaccagctactgctgtctggctccccggaccttcggggtgagtcccctgagacgctggattcagcggccccagaactgcaacacaggatcatctggctgctgtgagaattcgggaagctctggatgctgtggttctgggggctgtggctgcagctgtggatgtggcagctctgggtgctgctgtttgggaattatccccatgaggtcccgaggtcctgcatgctgtgaccatgaggatgactgctgctgctaaacatacgacagctcaactccagaatgcactgccccgctaccccttctggaacatgcaccagcttctggccccytctctgttagtgccagtgatgtagaacctcatcamtttgcctctgtgstttgyttctctaccaaggcagcctgccagagttagtamagtccccaaamtttggcatgaataaagctctgaatgcatttcgtggtaaaaaaaaaaaaaaaaaaaaagggcggccgc

SEQ ID NO: 3073 - DNA, 596 bp, Homo sapiens
ccacgcgtccgctgtttttcaaagtgggtaatttagtttaatggaatataaccactcattcatccttccatccaacagaggcaagtttggacctgccttgcctttttctgcttttaacatttgtattcaaagttgtacaccattgtcaaatgtataatgtagcagtaaatcattagaggaagtaagttaagtcctgttaatactgttctcaaatataaacatatttctttaatctcttccctatagttttttttttatagtgagataatggagttggtcttagccgctgcaggagcccttcttttctgtggattcatcatctatgacacacactcactgatgcataaactgtcacctgaagagtacgtattagctgccatcagcctctacttggatatcatcaatctattcctgcacctgttacggtttctggaagcagttaataaaaagtaattaaaagtatctcagctcaactgaagaacaacaaaaaaaatttaacgagaaaaaaggattaaagtaattggaagcagtatatagaaactgtttcattaagtaataaagtttgaaacgattaaaaaaaaaaaaaaaaaaaaaaa

SEQ ID NO: 3074 - DNA, 695 bp, Homo sapiens
  misc_feature (6)..(6): n equals a,t,g, or c
acactntccccggcccgcctgccggcccccggtccggcattcccgggtcgacccacgcgtccgcccagggacgtgtctgtgctcctgcgtgtgaccagggttgactaaactcctgccagcatgtcttgccagcaaaaccagcagcagtgccagccccctcccaagtgtcctcccaagtgtaccccaaaatgtccacctaagtgtccccccaaatgcccaccacagtgcccagctccatgtttccctgcagtctcttcttgctgtggtcccagctctgggagctgctgtggtcccagctctgggggctgctgcagctctggggctggtggctgctscctgagccaccacaggccccgtctcttccaccggcgccggcaccagagccccgactgctgtgagagtgaaccttctgggggctctggctgctgccasagctctgggggctgctgctgacctgggctacagaagagctcttgggactgaatggccaagaacctgctacggcctgatggatactctttccacttcctctcattccattcattggttggcagagaccacaaagactcatggggctttcctggaagaacttcgtgcttgatgtaacaccccaattgcaagtcttcttttcctcctttacctcatgttataataaagctctgatctctgactcaaaaaaaaaaaaaaaaaaaaag

SEQ ID NO: 3075 - DNA, 871 bp, Homo sapiens
  misc_feature (555)..(555): n equals a,t,g, or c
  misc_feature (585)..(585): n equals a,t,g, or c
  misc_feature (744)..(744): n equals a,t,g, or c
  misc_feature (837)..(837): n equals a,t,g, or c
  misc_feature (843)..(843): n equals a,t,g, or c
  misc_feature (847)..(847): n equals a,t,g, or c
gaaatacatacctttatatgcatatactatatacatacatatatgcatatacatttagaaataaaaacaccactattctacaaggggagttttattttcaccatttcatagatgcggaaccaatgctccctgatttccaataacttgatctttggatcgtagggtatgaccagcatgttactcctggtccgctggatcccaaagctcttgctccttttattatcctgcatggcccctggatactggggcagaagccttctcttcctgatcttaaaggctggtctgtagaacctgatcatctttcttctaggtaaggagcatcctggagccaaacttcagatacccctggagcattcccttcaccctcaaacctgagctcctcgccccactccagagtgagggtttggccatcacctatggcctgctggaggagtgtggccttaggacggagctggataaccccaggtcaacctgggatgtagaagcaaagatgcccctgtctgccctctatgggactctctcgktgctgcagcarctggctgaggctaagccctncctgatgggcagcagtccagagatgctggncctcgsccagctatgctgtgagtgtccytatgggtgcaagaratagggctgkgcctctctgcgtttccaggtggagtagagacagtaatgggtagagactttaggaaatgttttggggtggtggaatactctatatattgacaagagtttatatattgncaagagtttatatatttgtcaaaactcctcaaatagtatgttaaagacgtaagcgtttcactatgtataaattttacttcaaaataataaaancaaatnctgnctctaaaaaaaaaaaaaaaagggc

SEQ ID NO: 3076 - DNA, 843 bp, Homo sapiens
ccacgcgtccggctggatcgaatggtttttataattttctattttaccacagtttctctctgcatttttcctctttgaccactaaccatgtgaaattctcatattgacctttataatgatcatgaactcttagtatcattgggaaggccacatttgccacttatgattgtaaaccttatcctccatttttcctgttattgttggtgcaaaaagcacctattataccaggactttaaaaatcagtctgataagtctttgataagtctaataataataactgataagtccattgaatttgcttctgattactttttctttagtagctaaacatgtatgtactcctatgattacaatgaacactcctctccatttaaattaattatttacattgatgaaatagcaaaatgttaatgactaaatactgtcttggttttttcgttccaggtcagtcaatattaacttcttataattttcttttttttctttatgtgtgtgtgtgtgtgtatttttttttttttaatttcaatggcttttggggtacaaatggcttttggtcatatagatgaattctacagtagtgaagtctgagattttactgcaccggtcacctgagtagtgtacattgtacccaatatgtggttttttataccttgcccccctcttaccctccccactttgagtctctagtgtccattatgtcactctgtatacctttttgtacccataagttagctctcacttataagtgagaacacacagtatttggttttccattcctgagttgcttcacttagaataatatcctccagctccatccaaaattgctgcaaaaaaaaaaaaaaa

SEQ ID NO: 3077 - DNA, 2973 bp, Homo sapiens
gggaaacaggaagaagtatggtgggggctggggtagactcccctggagccaagcctatccagctaacaagagctccctggggctggtcacagctggctcatgatgctgaacttgaaagtttttttgtttttgtttttgttttgtggctcctccaagatataggtacatgaagtttaggttaaaggggtgggattctttatttttatttttgtattgtatgtgtcaagaattactctgttgttcaccttttgctttttgcactgtttgttctcttatctgtattttgagcttagtgctaggactgaraggctgcaccatagggaatgtatgggagatggtgaggggtgccagtgaggggtgcgtggaggagaggcctgggctcctctactggatctacactctgtcccaggtttttagatcccactgagcccagctgactgaaaacaaggacagtcagggtgaaacttcttttgccagaagtgtggcctgagttgaatttctgggaggatgacgcagatgtctgctgcagagctgggctgagagttctgcagtctagctctgacttaggtcaggggcctgttggtctctcattggacgtttttgggtctcactcatgcttactgaaacattgtgccaagaaactctgtgggatttgtgtcccttaaaccagactcacttttctgaaaaatctccattgttgaggagaggctgctcaatcgacaccccgagttctcatgactgggaagatagttttcttcaggtgtcaatggcgttagactcccaggaagactagccctgcccacaggcmacctgttggtttgagagcgtgttcgtgttctcttgccctccctgcctaagagctactgggatcacgttagcgggcatttaggctttgatgagagggcacagtttgagttaggtttacctccccctttctgtgcctgggaactgtttggtccagctttagaactgtggttttgacttccttatctcttgggagaagcttctgttttaaggaatttctcttccttcttctcctgcctctagcctctcctggaaaggcctggatatggtttctaaaatctcagctgagaacttcagaaaacagcagcagtattttccttttcctagtgctaaaatccctttccctagaaattggctcaccttgggaaacccagggaaagaatcagcaggttctctgccctccctaggggttggggaaggacccaccccggtcagcacagtgccttttcctctcctgctctgagccagggtggggcattccctctagattcaggtttgggcaggggtcctatagtccctgccatggggctgcttccctgtcccttccctcccctttgctggcctactctggcataattcaagtgtcttcttgccttggggatccttagtggcatcaaatggcaacatggaatattgtcctccatgcccctccagaaggacctaggagagtaggtgagctttccaaagtgagagacgaatctttctttctttttttttttaaagggcaggatgggtatgctttgggctttctccttctgtggccccggaggaaggagagactgaggcaaggcaaagtgatagtacactgaagcagaaccggaaacacccaggaactgttcagaaatctcagaagaaatctgcttctcttcgatggaaagatataattaacgatcaaagagctctaagaaaattgcaaagaagccttaatgttcaagctttagaaagatcagagcaatttttctctttcagtccaaactaagactctctgtatttaaatctctctggggcaagagggctagatttcctcattttgttatgagactagattggtaccagtagatcagctgcctagcgagggcaggtttcttctttgcatctgtgtggcttgcttccagtctggcctgtcctttccagctgccttttgtctagcctgctatggggggccagattatcttgataagagcaggtgatttggggactagctgggttggcaggaaaagagcaggatggatctcttgggacaggttcccccaggagtataaacacaaggagccaggattgtgctggcagccaaggaaacagtagtgcctgtttgagttggcagagagggccttggcacctcttgcatccaggcagtcttgtgagatgggggcacatagcactggggaaagcagaactccattctcacctctattttgagcttcagtgctttatttcagtatgaggaaaaacaacaacaaactgaagtgcgctttccgtcctttcaaaggacaactgtcgggaagggagagccgagttgcgaggtaggaggggagcactggcagggagagacattcttgactcctctcttccctggtgtgttgtgatccagggaatgaaaagaaatttgaccctggattggttctctccttggacttaaggaatcttaccttttccttccacaaagttctcccaggcaaggaccagctgcccattctgagcccagggcagcctcttcaaccattattggtctaacctggcttgtcaggaaaccaagcccacccttccacattgggcctggctgctctattctgtaccaagtactggagaaaaagcatcaagttcttagcccttgtagcttctaccctagtttcccatcctctctctgtggaggccaaaccaactctttgccagcagccacaacatgcattgacagcggcacagtgagatataactgatgggctttgaacctggttggccggggaagctgtaggggtggatagagctggctttccttctgggctgtctccatctgaccctaccccttccatgtcccaccccactcccaccaaaaagtacaaaatcaggatgtttttcactgtccattgctttgtgttttaataaacaatttgcagtgacaaaaaaaaaaaaaaaaaaaaaaaaaaaaaaaaaaaaaaaaaaaaaaaaaaa

SEQ ID NO: 3078 - DNA, 536 bp, Homo sapiens
gatttgaagagggcttgccttccaacctataggcactatatatgcttttggaaaaagtaattaggttaagatgcagttgttttgttttgctttgtttttcccttagctgggttggggtttctagcagcaatgatgtacaggtggatcttttttcacattaacactaccagctgctccatggctatagtgcttaggaatatctcagaatttcaacagatctatcagctgcaatatctaggagtcttgccaacacagagacacattcacatgctgaaaagagcatgagttgaaggcacagctggggacttttgatgcaggtccagaactggatggttgtgaagccattagagatatttaaattgtccagaatttcaggctctgctttaaaaactaggctacaaaccctcattcagaaagaggtcagtaatatgcctgtgagttagaaagatactggaaacatttcaatgccaaaagtaacatttttttccagaatgctatgactaaattttttaaaaaaaaaaaaaaagggcggccgc

SEQ ID NO: 3079 - DNA, 1898 bp, Homo sapiens
  misc_feature (265)..(265): n equals a,t,g, or c
  misc_feature (1854)..(1854): n equals a,t,g, or c
  misc_feature (1859)..(1859): n equals a,t,g, or c
  misc_feature (1888)..(1888): n equals a,t,g, or c
  misc_feature (1897)..(1897): n equals a,t,g, or c
gggtggagagagttcggcgctcagagaggtaccagaccatgaagctcttcacccagatcttcggggtcggtgtgaagactgctgaccggtggtaccgggaaggactgcgaaccttagatgacctccgagagcagccccagaaactaacccaacagcagaaagcggggctccagcaccaccaggacctgagcaccccagtcctgcggtccgatgtagatgccctgcagcaggtggtggaggaagctgtggggcaggccctgctggngccaccgtcacgctgaccggcggcttccgcagggcctcatcctgtaccaccagcaccagcacagctrctgtragtcccctacccgcctggcccaacaragccacatggacgcttttragagaagtttctgcattttccgcctaccacaacctccaggggctgctgtggggggatccacgaggccctgcccatcctggaagccgtgagagtggacttggtagttgcacccgtcagccagttccctttcgccctgctcggttggactggctccaagcttttccagcgggagctgcgccgcttcagccggaaggagaagggcctgtggctgaacagccatgggctgtttgacccggagcagggaagcagcagtggcaagactcctaggtcacggaagtcctgcttctgttgcagaagacatttttccamgmggcttcagaggaagacatcttcagacacctgggccttgagtaccttcctccagagcagagaaacgcctgagcctgcctgtktcccccacttccactcaggaaattgggctgcccccaacctggccactgaatgtctccaggcagatatgctgccccctgacccccaccttcacccctccccgccaaggcctggctcttccggaggtcaattgtgcctgcaggatcagttgagcccctgctggtgtgctgcagggtgtgatgaggtgggagccctcagtgccagcctcatcactgtgtgaccctgggtctgctcttagcctccccatggctcacgttcctgccctggatgggatgtgagtggggcccacatcgtggagctgtggtggggcctgcagtcatgaatggcaagtggtccctgatgtgcagtgtctcattagttgcactgcagttaactgtggctcctgcagggcaccctgcccagaatgcccagaagagaaccatgcatacctgcactgcatttgagagccatgagctggaggctgtggttcgtgccagcaaggagcctactgtctggtgtgctgtaggcatctggagagggagagggcctgggtaggagctgggaggaagataattttcaactatggggcttcagtactgcagcgccccgagccaggctctgtgcttctgcctttaaggcctgttctcagcacaatgtctcaaaaataggtcatatcctgccactcccgtcgcagagccctttaatggttccaaaccctaagtccacacatagcccctggctctggcatctctccagccccactggccccgagctgcttgactcaccggcttcctatttgatgcacccaggcccccttgtggccaactccctccccttctcactgaggcagaagcactgaggtgggctggacatgggtgccctccacgtccctcatatccccaggcacactctggcctcaggttttgccctggccatgtcatctacctggagtgggccctccccttcttcaggccttgaatcaaaagccactttgttaggcgaggatttcccagaccactcatcacattaaaaaatattttgaaaacatgcagtaaaaaaaaaaaaaaaaaaaaagggcggccgctttaaaaggatccttcganggggncccaagcttacgccgggcattgccaacgncataacttnt

SEQ ID NO: 3080 - DNA, 1701 bp, Homo sapiens
gggcagacggaagccgaacgagttcctcggcggctgcaggatgggggactccaaagtgaaagtggcggtgcggatacgacccatgaaccggcgagagactgacttgcataccaaatgtgtggtggatgtggatgcaaacaaggttattcttaatcctgtaaatacgaatctttccaaaggagatgcccggggccagccgaagtgtttgcttatgatcattgtttctggtctatggatgaatctgtcaaagaaaagtatgcaggtcaagatattgttttcaagtgccttggagagaatatcctgcagaatgcttttratggctacaatgcatgtatctttgcctatggacagactggctctggaaaatcttataccatgatgggcacagctgaccaacctggattaatcccaagactttgcagtggactctttgaacgaactcagaaagagggaaatgaagaacagagttttaaagtagaagtgtcctacatggaaatttataatgaaaaagttcgagaccttcttgatcccaaaggaagccgtcagacgttgaaagtcagagagcatagtgtgttgggaccttatgtcgacggactttctaaactggctgtcacaagctacaaggatattgagtcgttgatgtctgagggtaacaaatctcgcacagttgctgcaaccaacatgaacgaggagagtagccgatcccatgcagttttcaaaatcaccctcacacatactctctacgatgtgaagtctgggacatctggagagaaagtgggcaaastcagcctggtggatttagmtggcagygaacgagcaacgaagacaggcgctgcaggggacaggctgaaggaagggagcaacattaacaagtccctcacaaccctcggtctggttatctcagctcttgcagatcagagtgctggcaaaagcargaataaatttgttccatatcgtgactcagttctcacttggctgctcaaagacagcctcgggggtaacagcaagmccgccatggtggctactgtgagtcctgcagctgataactatgatgaaaccctctcaactctgcggtatgcagatcgagccaagcacattgtaaaccacgctgtggtgaatgaggaccctaatgcccgaattatccgggatctccgggaagaagttgagaaactccgggagcagctgaccaaagcagaggcaatgaaatctccagagctaaaggaccggctggaagaatctgagaagctaatccaggaaatgactgtgacctgggaggagaaattaaggaaaacggaggagattgcacaggaacgacagaaacagcttgagagtcttggaatatctcttcagtcttcgggaatcaaagttggggatgataaatgcttccttgtgaatctgaatgctgacccagctctgaatgagcttctggtgtactatttaaaggaacatacattgatagggtcagcaaattcccaagatatccaactgtgcggcatgggaattcttcctgaacactgtattatagacatcacgtcagaaggccaggttatgctgactcctcagaagaacaccagaacatttgtaaatgggtcatctgtctccagtccaatacagctacaccatggggacaggatattatggggaaacaatcatttcttcagactcaatttgcctaaaaaaaaaaaaaaaaagggcggccgc

SEQ ID NO: 3081 - DNA, 787 bp, Homo sapiens
  misc_feature (7)..(7): n equals a,t,g, or c
  misc_feature (11)..(11): n equals a,t,g, or c
  misc_feature (16)..(16): n equals a,t,g, or c
aacactntcanacggnaacgcttcactatagggtttcgctggwacgcctgcaggtaccggtccggaattcccgggtcgacccacgcgtccggaagaatcagggcagaaaagtgcttttatcatggctccggggaccttagcttcagttggtgttgtgagaattcctcacacaaggacattctccttgcttcagcatcaggatggaagtgtttctcatctggactttttcaaagactcagctggaggaatcagaattcataatttcctggcagctcatgattctgctacactacaccatgccatctcttgtgtgaaaggacagatttgatggaggactatgtcatccctcatgcgtttcttattgtctacatttattctaatgggaagaagtgagcaaaaacaccacaataatttgggtagtttttagaaaaccttgttagtaaattagaatagtgccactttggcattatgagaaagaagcatggatacataactagggttttgtgtatgactacaacgaaatgcagaatggtgtctccaaaaggtttccagttgctgccacaagaactgcttggtattgcctacatgtgttgtcctatttttgctttgcccttctgcagttacttgctgtgggaccttggagaaattaacttagcctctctgtacttcagttttttgtatttgtaaaaatatatttgtaataatctcatagttaaaaaaaaaaaaaaagggcggccgctctagaggatccaagcttacgtacgcgtgcatgcgacatcatagctcg

SEQ ID NO: 3082 - DNA, 1030 bp, Homo sapiens
aagctggtacgcctgcaggtaccggtccggaattcccgggtcgacccacgcgtccgctcgggagccgcaacctagaagccagaattgtgtatcagattcaactaggagaaaatcccacctccaggctccattaatccttccaatggagtggaagtttctctcacagagaaactagtaaggggatccaatgggaaaagaacgttcacacggactagaagacgaaaccaatggaatggaaaattgtcctcgcgttggtagaagcagccaatgagatgaaaagagcccgcctccaaagtggctgcagaggcaatggggtgaatcgtgctcagaggcgcgctccaatggggtagcagggctcgcccggccgccactaccccgcttccccgcgcccggagtccccacccacggccggccgcggagccgagtgctgacccgggtccgaggagctgcaggtgtgactgatgggaatgaagtggccaaggcccagcaggcaactcctgggggagcagccccaaccatcttctcccggatcctggacaagagcctcccagctgacattctctatgaggaccagcagtgtcttgtgttccgtgatgtggcccctcaggctcctgtgcacttcctggtcattcctaagaagcccattcctcggattagccaggctgaagaagaagaccagcagcttctaggacacctactccttgtggccaagcagacagcaaaggctgagggcctgggagatggataccgacttgtgatcaacgatgggaagctgggtgcacaatctgtgtatcatctgcacattcatgtacttgggggccggcagctccagtggcctccaggttgaacctgccaactgattaaaggacaccagactctggatgcttggatggaaagggaaaaatggaccctgtgatgctaataaaactgttctcccttaaaaaaaaaaaaaaaaaaaaaaaaaaaaaaaaaaaaaaaaaaaaaaaaaaaaaaaaaagggcggccgctctagaggatccaagcttacgta

SEQ ID NO: 3083 - DNA, 2770 bp, Homo sapiens
  misc_feature (1570)..(1570): n equals a,t,g, or c
gcagcaatgagccaggcatcgggccgctgatgagggatataaagaacaagatttgccaggactgtgacttagtggccctcctggaagatgacagtggcatggagcttctagtgaacaataaaatcattagtttggaccttcctgtggctgaagtttacaagaaagtctggtgtaccacgaatgagggagagcccatgaggattgtttatcgtatgcgggggctgctgggcgatgccacagaggagttcattgagtccctggactctactacagatgaagaagaagatgaagaagaagtgtataaaatggctggtgtgatggcccagtgtgggggcctggaatgcatgcttaacagactcgcagggatcagagatttcaagcagggacgccaccttctaacagtgctactgaaattgttcagttactgcgtgaaggtgaaagtcaaccggcagcaactggtcaaactggaaatgaacaccttgaacgtcatgctggggaccctaaacctggcccttgtagctgaacaagaaagcaaggacagtgggggtgcagctgtggctgagcaggtgcttagcatcatggagatcattctagatgagtccaatgctgagcccctgagtgaggacaagggcaacctcctcctgacaggtgacaaggatcaactggtgatgctcttggaccagatcaacagcacctttgttcgctccaaccccagtgtgctccagggcctgcttcgcatcatcccgtacctttcctttggagaggtggagaaaatgcagatcttggtggagcgattcaaaccatactgcaactttgataaatatgatgaagatcacagtggtgatgataaagtcttcctggactgcttctgtaaaatagctgctggcatcaagaacaacagcaatgggcaccagctgaaggatctgattctccagaaggggatcacccagaatgcacttgactacatgaaaaagcacatccctagcgccaagaatttggatgccgacatctggaaaaagtttttgtctcgcccagccttgccatttatcctaaggctgcttcggggcctggccatccagcaccctggcacccaggttctgattggaactgattccatcccgaacctgcataagctggagcaggtgtccagtgatgagggcattgggaccttggcagagaacctgctggaagccctgcgggaacaccctgacgtaaacaagaagattgacgcagcccgcaggagacccgggcagagaagaarcgcatggccatggcaatgaggcagaaggccctgggcaccctgggcatgacgacaaatgaaaagggccaggtcgtgaccaagacagcactcctgaagcagatggaagagctgatcgaggagcctggcctcacgtgctgcatctgcagggagggatacaagttccagcccacaaaggtcctgggcatttataccttcacgaagcgggtagccttggaggagttggagaataagccccggaaacagcagggctacagcaccgtgtcccacttcaacattgtgcactacgactgccatctggctgccgtcagnttggctcgaggccgggaagagtgggagagtgccgccctgcagaatgccaacaccaagtgcaacgggctccttccggtctggggacctcatgtccctgaatcagcttttgccacttgcttggcaagacacaacacttacctccaggaatgtacaggccagcgggagcccacgtatcagctcaacatccacgacatcaaactgctcttcctgcgcttcgccatggagcagtcgttcagcgcagacactggcgggggcggccgggagagcaacatccacctgatcccgtacatcattcacactgtgctttacgtcctgaacacaacccgagcaacttcccgagaagagaagaacctccaaggctttctggaacagcccaaggagaagtgggtggagagtgcctttgaagtggacgggccctactatttcacagtcttggcccttcacatcctgccccctgagcagtggagagccacacgtgtggaaatcttgcggaggctgttggtgacctcgcaggctcgggcagtggctccaggtggagccaccaggctgacagataaggcagtgaaggactattccgcttaccgttcttcccttctcttttgggccctcgtcgatctcatttacaacatgtttaagaaggtgcctaccagtaacacagagggaggctggtcctgctctctcgctgagtacatccgccacaacgacatgcccatctacgaagctgccgacaaagccctgaaaaccttccaggaggagttcatgccagtggagaccttctcagagttcctcgatgtggccggtcttttatcagaaatcaccgatccagagagcttcctgaaggacctgttgaactcagtcccctgaccaccacacagcagctgcggcggcgaagacgaagctggcttgccttccaccctctgttctccctccttgtgcattaagttccctccgcgggatgctgcattgttaccccgccctcccctctctcatttttcttggtgtggcttggggtttttaggcttcctgttttatctcgtgtgtgtggtgcaccagctatgaggttgtctgtaacccaagccatcaaagggcctgtacatacctaggagccatgagttgtcccggccagcttcatacttgagtgtgcacatcttgagaaataaacaagtgacttaacacacattgaaaaaaaaaaaaaaaaaa

SEQ ID NO: 3084 - DNA, 598 bp, Homo sapiens
  misc_feature (597)..(597): n equals a,t,g, or c
aatttcgaataatccggggaaaccccaagagccttactggtcttctgtaacttccaagactgaccagctttttatgtatcagtgtttgataaacacagtccttaactgaaggtaaaccaaagcatcacgttgacattagaccaaatacttttgattcccaactactcgtttgtyctttttctccttttgtgctttcccatagtgagaatttttataaagacttcttgcttctytcaccatccatccttctcttttctgcctcttacatgtgaatgttgagcccacaatcaacagtggttttattttttcctctactcaaagttaaaactgaccaaagttactggctttttactttgctagaacaacaaactatcttatgtttacatactggtttacaatgttatttatgtgcaaattgtcaaaatgtaaattaaatataaatgttcatgctttaccaaaaaaaaaaaaaaaaaamtcgagggggggcccggtacccaattcgccctatagtgagtcgtattacaattcactggccgtcgttttacaacgtcgtgactggggaaaccctggcgttacccaacttaatcgccttgcagna

SEQ ID NO: 3085 - DNA, 2306 bp, Homo sapiens
  misc_feature (10)..(10): n equals a,t,g, or c
  misc_feature (19)..(19): n equals a,t,g, or c
  misc_feature (39)..(39): n equals a,t,g, or c
  misc_feature (75)..(75): n equals a,t,g, or c
  misc_feature (875)..(875): n equals a,t,g, or c
ccccggagcngaggactgnacccagccaagcgtgcccangcgacacgtcccgtccaacggcccctgtatgatgantgacccctgcttgctgctgaactgaggaccgcaggccgccaccgctcggggcctctggagacttccccctggagcccgccaggccgacactgctgcactcactctgcaagggatcaggaccagcaacctttatattctagattctargacattgtacagagaaatycagaagtgtaaaaatattgcacattgacaaataccaagaatttttgcgtatgtttatattgtattgttctaaataatgggtagcctgtgaaataagawcktgccrcccatgtaataatagtagtaatactakagttaaaatggctgtaagaatagttttataaaagtgaatacacagatctattgtatttgaaacataactttgacaattattagtgtgaccaaagtattaggcggttttcatacattttycaccttgtacaaaattatgaattcatttttcctccaggccgacaaggagttgtagaatgaaaatgccctctaagtgttattttggttgttctaacttacaaaagtgattttgaataagaaatatttggtgttctttttataaccagtttttgattggtaattgttttctgtattgtttaaaacggatcaaaaatgtaagtctattggtagagattaagtatttattgctacatcatagttgataaattgatgttatcgtaaagccatatgttctgttcaagtcttgtttgcttgaaatgattattcctacaagtgaaacactagactatttggagtgtatatggcttgtgttttgggatttttttttttttttttkggctttngttttkgtttgtttttttgtttcatttggtagttcatctgccttttaacccattcaccaaaatttaccttgttaacaagcatcaccaatgaacatttcagagcaatctgcatatttaacagacctaaaataaatcctattaggcaagtcagttgaaaatgctcgtgctgctaatggaattagagtgcgttcattttacaggctagtattttaaaartagaaatcaaaatctggcacygaagcatgctaattgtttactgtaccttgtgaggttttcactcataaatttaaaccagtgtatttttttagaactggtttgtgtatatatatagtgattatggatactaattcaatgtaatttataattttctatgtcaatacaaaaatacatcacagccttctcaaacagctcaagcaatatattgtatattgccatatcgtctggtgaaagggttaaattacttcacctcttgcacttttagatgcaaatcagtttttcatttctgtaatagaaaattattcacgtatttttacatcatttgtttttcctgaccagtatttaaaaccaaaaggatattctgaaaaatggccaacaatttttttagaagtagcatcccaagcagcgtgcctaaacattacattgcatatggaaataaaagaatcaaacgtctaatgccttattatttctgatttcctttttcattttaagtggtgtggagattccagcactcccaggacagtggagtcagcagtaagccctgggacaggtggcaagggtgggtcccttgacctttgcacgcctyctcaggaaccccctttcccgggtgagcccctctctgaagagactgtccttgggcctcctctggaagcagcacccccagaggacagggctcctcctgcttgcctcagggctgcctgacttgaatggcgttggacctcggggattactggtagataatatgctctggtctcgcctggtggtgagttttgccagccatggccagggtttggctccactggtggcacacgtggcctccgtggtatggacctggtggcttctccatcccactgtggcctctgtggtatggacctggtggcttctccatcctacccaaggtaacagtgtcttgcttcatcccactgactgctgggagagagcctctgggacttttctttggggcatcattttgttttgtctttcgtagcagggaaaggatatgacaatggggaggacagttcttttggaggttggaggggccaagccaaggacaggagcaagtgtgccctcattttgtttctacttttaatttctgtgtgttggccatactgaattatgagactaacagatgtctacaatacaatacctgtattcaaaataacaaaaataaagcctgattctttgtttctagaaaaaaaaaaraaaaaactcgag

SEQ ID NO: 3086 - DNA, 91 bp, Homo sapiens
aatttatatttttaagagcttatgaatcaagattcggatattttcagatttatgttttctcatgatgtccatgtaatcaggtagataaacc

SEQ ID NO: 3087 - DNA, 699 bp, Homo sapiens
ggcacgaggaaaaacccaaactgagactcttaagttttgtttagcaatgtgtttctggtatgaaacaaactactgtgtcactgtccaggtaggaaacaattctttcaactgggttttcagcataaatgggaactgatgtagaaggcaggatttagcccttctaggcaaaagaaaagctcagttgggtttcacgagtgttcctgtgcttatattcagtctgtgcctacatgttctcatgcatgtctaacctgatttacctcttacctgtaacctaccttatcatgtggcttttaattggcagtcactcgccatttctaagcagatatagtactacctttcagaactcacattggcaagtgtaaaaagatgacttaaggtgaagtgaggacaaaatcacattctgcatactaaccttttttttctccctttaaggtgctaaacttgcacctcatgtccactcagtaacaagtattgggacgtagagcacagcctcactcagctctgaaaggtaatacagcctgtgaggaagtgagccagcagtggcctttgcaattgtggatcttaagctctgctctcagcagatttcaggtgtaaccatttgttaactgtactgaaggtgtgtcctcaagaagaaagtgttcaaattaaaaaagctgctgccaagtaaaaaaaaaaaaaaaaaaaaaaaaaaaaaaaaaa

SEQ ID NO: 3088 - DNA, 338 bp, Homo sapiens
  misc_feature (5)..(5): n equals a,t,g, or c
ggcanaggtccatctgaatgggtgtttagtagggtatgacttgtgagtccacaaggccagcagtatatatgctgaatggactgcttagcagtaacacactggaaaaatccaaaaagaatggatttcaagttggcaaaaaatgcattagaagtcagcagtgtgatgtggtcaggagaacaaccagagtgactgtgggatgaggtcttggatagactttgtttctatatacagttcagccctctgtatcccatggtttctgcatccatggattcaaccaaccaaggctcgaaaatattaaaaaggaaaaaaatccaaccataaaaaaaaaaaaaaaaaaa

SEQ ID NO: 3089 - DNA, 2789 bp, Homo sapiens
  misc_feature (754)..(754): n equals a,t,g, or c
gtgaaggagcctcttctgccagatagctgtgaaacaggcactggtcttgccaggattgaggccacccaggctcctggagcaccccaaaagaattgcaaggcagtcccaagttttgactccctccatccagtgacaaatcccattacatcctctaggaaactggaagaaatggattccaaagagcagttctcttcctttagttgtgaagatcagaaggaagtccgtgctatgtcacaggacagtaattcaaatgctgctccaggaaagagcccaggagatcttactacctcgagaacacctcgtttctcatctccaaatgtgatctcctttggtccagagcagacaggtcgggccctgggtgatcaragcaatgttacaggccaagggaagaagctttttggctctgggaatgtggctgcaacccttcagcgccccaggcctgcggacccgatgcctcttcctgctgagatccctccagtttttcccagtgggaagttgggaccaagcacaaactccatgtctggtggggtacagactccaagggaagactgggctccaaagccacatgcctttgttggcagcgtcaagaatgagaagacttttgtggggggtcctcttaaggcaaatgccgagaacaggaaagctactgggcatagtcccctggaactggtgggtcacttggaagggatgccctttgtcatggacttgcccttctggaaattaccccgagagccagggaaggggctcagtgagnctctggagccttcttctctcccctcccaactcagcatcaagcaggcattttatgggaagctttctaaactccaactgagttccaccagctttaattattcctctagctctcccacctttcccaaaggccttgctggaagtgtggtgcagctgagccacaaagcaaactttggtgcgagccacagtgcatcactttccttgcaaatgttcactgacagcagcacggtggaaagcatctcgctccagtgtgcgtgcagcctgaaagccatgatcatgtgccaaggctgcggtgcgttctgtcacgatgactgtattggaccctcaaagctctgtgtattgtgccttgtggtgagataataaattatggccatgggaaacattgtatatttagtgtgtgtattttgataatgattgatcttaaatctgtatacagaatatcattgatataatactctttaggcaggagcactcttgccttcccccaaaatttacactgctaaagccctctgtcacttggcgacccttctggtcttgctggaggggtttcctgggtataacccattgggctgcccaaggccagccagcctgagctctcctgcaagacagagcctgatgtggcacggagtggggttgcggggggtggggggactgcctgactcccagagggacttgaaactgaagcaagaaggttgcattctccaccaagggagttaacctacctgaactaagtagaaatgccagtcttccactaccccctccctgccatcttttcttctgctactttggggagttgatggccaggaaagaagccagcacagggttaaagtaactcctggcattgcccaccagggggctggtgcacctgctgacctcagggtcacagttgagtcatttgccagttgacggagcaagtttgaccttggttctgttgctgaagcaaatttggaacttttctgtctcagtgtgatccactaacccacaggatcatttggaaccttgaatagctctgcttggacaatggggttggggaatagggttgtctttcctatgaaaatgccatctgtagaccttgtgagtcagccgtccagatgtttgcaggtgaattcctctgcttgacatcctccctgtcactttggaccctatgggagtgggcatctccacgcacctgtgtatgtgaaagtcattttacatttcaaagcagtgtgtgtttcttatttttatatttttaactctttattcttggatgtataaagtgaactttttggcttctgtaagtatgctctatgcacctctaatgttttatcatgtatttatatgttgtacacagtactggctgattctgtaaatggatgtattgtacagagaacatgaacgtctcttcctaattttacatcttcagcatcattgcattaaagtggtgtaatctccttctctacatctgttgtcagagccactgagtgctgtgctgctcgacgtgagggtgaaatgattgacttgtgacctgccaggttgcccgatgccctgttgggtcaccggctggacctgctgcagcctgcagagccacagtcagcctgcccacatgccaccgagcaaacgcatcttgcttttcacatctctcctcctacagccttaatggctgcttgctgccatatgtgacaaatcaccaccaccagtgttaagtgcttctggattcatgggtgagttccctgggcagcccccaggaaggccttccagatctggctccagggtcaccacctgtcacagcaatacctgggaccatgctctcctgggactgtgaggctccttttgacgtacttttgacatcaggcaggtttgggaagaaacaaagccatgcctgctcctgcctctctcccaacatgtttccagcaagtagatgcccctgtgtgtgttttcccttgccttgtttcctgccttatatcttgtatttcgacttattacagagttgagggttcttgcttaatttagatcaagtataaaatttgtatgacttcaaaaaaaaaaaaaaaaaactcgag

SEQ ID NO: 3090 - DNA, 1145 bp, Homo sapiens
  misc_feature (1109)..(1109): n equals a,t,g, or c
  misc_feature (1127)..(1127): n equals a,t,g, or c
  misc_feature (1131)..(1131): n equals a,t,g, or c
ctgcaggaattcggcacgagattctactcagtgctctgggctatctccttctcggagcagccaccaatgtgtttctgtttgtcctggctagagtcccggcaggtatttttaaacacactctctccatctcaagggctctactttctgatgtggttccagagaaggaacggccgcttgtaatcggacacttcaacacagcctccggtgtgggcttcatcttgggccccgtggtcggtggctatctcactgaattagaggatgggttttatctcacagccttcatctgctttttggtcttcattctcaatgctggtctcgtttggttctttccatggagggaagcaaaaccgggcagtacagagaagggcctgccattgcgaaagacccatgtgctgttgggaaggagccatgacacagtgcaggaggcagccaccagccgcagagccagggccagcaagaagactgcccagccctgggtcgaagtagtgttggccttgcggaacatgaagaacctgctgttttccgaaatgtgggacatatttctggtgcgcttgctgatggccatggcagtcatgctgtactacagtaactttgtcctggccctggaggagcgctttggggtgcggcccaaggtgacaggctacctcatcagttacagcagcatgctgggggccgtggccggccttgccctggggccaatcctacggctgtacaagcacaactcgcaggcactgctgctgcattccagcatactcacctgcacactgctgctgctctactccttggcccccaccatgggtgcagttgtcctctcctccactctcctgtccttctccactgccattggcaggacgtgcatcacggacctycagctgactgtgggcgggcccargccagcggcacccttattgcgtggggcartctgtgactgcagtgggccgatatcgccctctctctygggggttgccargaggcagccttgggcccccagctggcctggtagctatgcatttataatgtctctaaacaagcgacactctagtggtgatgggaatagtaaattaaaaagkgagtagatggatttggacaacaaaaaaaaaaaaaaaatnggggccgacatgcttagnggtnatatgcggttaagg

SEQ ID NO: 3091 - DNA, 592 bp, Homo sapiens
cccacgcgtccgcccacgcgtccgggaaaataaaaccaaggcccctttgtcagcatacagcttcagtagataccccaaattcttgaaatctgtatagcagactgctggttttttctccttgtcagagcccagcccactgacactttacagttgacagcccagcccagatatgggccgctgtggcttctatcgaatcatgcttgggattgccacagttttcttctttggattggggcttgaggtggttgggaagaatgcatgccaaccagccctgcatctgggacttggagcctgtcagctccctgctctttgataatggaatagtctgtggacttcttcccatttgtgagagaaaactcccccttagaactcaactggtagagcttctcatagcttacagttccaagcaatagcttggttgtaggtccaggcaggactctgacatggccctctggaatagcattgatgtgttgggttcttcgctaagatgatttccagtctgtgttccagggagattcaggaaagctgaagttcattcttagaacctaggtctgtgtttgttgttttgttttgtttaaaaaaaaaaaaaaaa

SEQ ID NO: 3092 - DNA, 2230 bp, Homo sapiens
ccacgcgtccgctttatatggctgtggggaagagtagccaggaattaatgtatataagcacttaaaagaatgcctgacatacagaaaatactcaatacatgttaactgtaattaatttgaagtggcttcttaaatcaatatttattgtgcatcattttcatcttttaaagataattgctttaatacttgagtatctaattttttttaaacttaagatttttagttagttactgtgttttagactggcaactgtttcagtactttccaaaactgctatctctactgaggtattgtcctgtctcccagtgaaatgtaggctgttcccgttggatggattgacatgggagatttgaaactagttctcctgatttctgagcttatcattgagttcccatgaccaggtgttggtagtgtccacaacagagcaggaagagaaatagtacagaatttcagtggcaagttcttaagccttaacctgtactttaagtccagtccctaaactttcatattccttagtagagaacagatgttcccctttttttcccccacattttccttttttggcttgggggaatagattttttaaaaatctgaatttatattccaaaaaggcatgtgcaagttaattttcctaagtcaatgaagccggtttttaatcttactttgtaagatgcatacctgcagtgagagaagtaggtagggctttagtaatttgtgtcagggaccatgtcctattaaatcctgtgaaaatatgcacatgtagtacacaaagaaaaatttaagggaagaagagttttttccaagttattttataaagtattctttataaaagtatatttcttgtaataatcccccatctgtccttctagcccacctttactttctcacacttatgctctcataacaattaaaatataatcaaagttacttgggtaacttaaaaaattttcattataggaaggaaatgtgttttgaaaatcagaaatttttcaaattttaataaattttagtgttttttatgcaagctgtgagttgaagatgaggggctgggatataaagctaaatcgggtacttatctttattacttatgacctactagggtgtccagagtatgcagagaacatatgggaatttggaagctgggaatggagactggaaaagtgctggattttgaatagtgccaggaaataaaggaagacttagcaagggatcatttttcaatgccagtgacatgctgtgtaatagtctaccatgggaaatttgaatgcttatacgattggtcagtatactaatattgtcttgtaatttgaacactaactcttaatattaacaaattttttttctcaacagccatcgtaggaacttttaaaataggttttgcatttcccctgaaaatggtgagttaggtcatattaggaaaaataaattctagaataaatacaattttgattaaaccggttttctctataaaaacccaagacgctgtatctatctttaatgttatctattgttaaaatttcatttccctcaacagcatgcatttccatgtttattagaccaaacaacttcttgttttacttcttacctttgtttttccttgttgttgttatttaattagaaaagaaatgctgtttgggccttttcatatgcctcaaaaatgtttggttacacagaggagtgagttagatttataggactcacacccaatttgatctcctcaagtgcatttctaaccatgttttcatccacttttccttgttttaggtttctcatagaaacagcttttcattgagctaaatgtatttcctctcttactcgttcttggaaatctaggactatgtatgtgaaacttcttattcttgtacacaataactcttaagtatttgaaaatgactgttctacttcagtcttcttttttgccaaactgagggaaaaaattcttttttttttttttaaaccgcatgcatgtgacatggtttacagacctttccccatctatatcgctctactcatgcacctaattggaagcgccaccctagcaatatcaaccattaaccttccctctacacttatcatcttcacaattctaattctactgactatcctagaaatcgctgtcgccttaatccaagcctacgttttcacacttctagtaagcctctacctgcacgacaacacataaaaaaaaaaaaaaaaaaaaaaaaaaaaaaaaaaaaaaaaaaaaaaaaaa

SEQ ID NO: 3093 - DNA, 1223 bp, Homo sapiens
  misc_feature (13)..(13): n equals a,t,g, or c
  misc_feature (28)..(28): n equals a,t,g, or c
  misc_feature (38)..(38): n equals a,t,g, or c
  misc_feature (116)..(116): n equals a,t,g, or c
ccgattccaaccntccgggacttctaanctaagccccncgggacggaataccaatttccccccaggaaccaagctatgcccactaaggctttgcaaaaaacctattttaggtgccncctatagaaggtacgcctgcaggtacccggtccggaattcccggggtcgacccacggcgtccgattaattttagcatccctctggggatcttgcctgcaatgattaatactgtggtattctcatgactgatattgtctttctgtcatgccttctattttttggtgggaattcttctacatggaaggctgtttcttcttctccatttatattggtatggatacgtgaatatttagtttattctgtaggtcataatacgacagtattgtgatatattttggtgctcaaattgttccgggtttggcccataggaggtctttcgggcaggttcctgcacccttttgacatgccccgttcttttttgagcactttcttattttttggcactgtaagaggctttacactgtcatcttggacttccctgcctcagtcttggaattaactcattctccatggaggctyggttcgttttattatagaatcatatttagaactaagatctaggtgctagttgcgctcattactgctggagtgtcattgcttctagaacttctcaacagagtttagaaatatgtgtattatacaaacccatgcacatacacctatctccatttattcctgtatctctgtgtatattataattttagtatatttatatttctttctggacacattccattatttgttcatatatttataacatatcagtatctattataaattatatatatgtacactttaatgtgtgtttgtacctaattccaatccaacacaacaactgggttttttcaaacttgkttctttgkttttttctttttgtggagagcagggtctggctatgttgcccagctcagtctcaaagtcctgggctcaagcgattctcccgcctcggcttccctaagtgttgggattacagacttgagccactgsatctagccacaactgagttcattattctgagctttctttgggatgktatttaactctcagttcttcttctataagatggaaataatamcaactaaaggctaggatttggggaaggtatggtaaattgkaaaaatggtagcttgtttaaaaaaaaaaaaaaaaaaaaaaagggcggccgc

SEQ ID NO: 3094 - DNA, 1168 bp, Homo sapiens
aattcggcacgagcacagatagaaggagtggtggtatttttaaagtgaactgttgcgatgatatctgcttagctttctcatgctaatctctttctgtggtccatcttttgaaggcctcccttccctgctgggcttccttgcaacacacctaggaattgaaatgtgctcccttttctgtctctctgctgtgctatgtcatcgtcatctccactagttcttggtgcctggcaagaggtggcagccataggatgttttctaaatgaaggagcaaatcaatgaagacgtgccgaggtgcctacatctccacctctggtccgtctcattgcaggctgtaatcgggaggtgaaggagattgaatggaaggcatctaccagcatcagtttggttctgacttgggtttctgccctgttcatggcacagagtccccaccccaaactctagttttagtagatggctatcaattctcttgtgcctaaattcctgccttgtcaaccctagtgcgctgttagccccccaagagaggagcccagcaggttcttgacagcagaatttgtcttgcctgtattttgtccactttatgcatctttgagtccagacctgtcatgagctgtactctttaatctcagacaccttggccatttttcagagtgactaaatagtgcctgctgccaggtccctgttttcaagctccatggcccatcaggaaagaccatgatccctctctgacctcccttgtgatagctgtatgcaatatttctagctgctgcttgtcactgtttggtcaggatgttccctccacttaaccattgctgcccctgaattctttcctaacacttaccccaattcatgggccacctcagggaacatagctagttcaacttcctggcacctgttaaaaagtttcttgagatggagtcttgctgtgttgcccaggctgatctcaaaatcctgggctcaaaggatcctcctgtcccagcctccagaatagctgggattacaggcgcatgccaccgtgcctggcttgcaggcacctttaaccatgcaagcccacagctatcattcttcaatctggtcaagtcattagatacaacaaatgtaatcaaacaaaacacatggaggagaaaataaaataacttactggtataaagaaaaaaaaaaaaaaaaaaaa

SEQ ID NO: 3095 - DNA, 1193 bp, Homo sapiens
ggcacgagggaagaaggtgctcaccctgctgggcctctcgagcctggtgggtgtgacatgggggttggccatcttcaccccgttgggcctctccaccgtctacatctttgcacttttcaactccttgcaaggtgtcttcatctgctgctggttcaccatcctttacctcccaagtcagagcaccacagtctcctcttctactgcaagattggaccaggcccactccgcatctcaagaataggaaggcacggccctgcaatatggactcagctctggctctctgtgtgaccttgggcagctccgtgcctctctctgtactccctcagtttccttctctgtacaatgtggctggggagggagaggatgggaccaggttggaccacgtggcatcagaggtcccatccagatccaactataggtccaagagtccacgtaagcaggttagcaaggctctaaagttcctatagtcctgagaccccctgccagcaaagagtgacagtcacctccatgccctgccctcattgcaaagccctcactcaccttctggtctcagcaagggaggagagtctgttgctggcatagccctggaaggagcccccagcctctcccctcctcctccttgtcactggcctcccacaactccccttctggctgcctgtaaccttgaggggcattcaggaggccagcgttccctcaggcattgggggtttgttttggggggtgggagttgatcttcccacccagtctgcccctggtctctgcccatccaatcagagcccaccctcctggaagagacccccgtgttcagagtgctggcagccctgcacgtgtccagggacactgcatttcaaagaaccactgagtgggtgagctaccttgggcaaaccccccactcctgactctgactgccacgtgggtggcccgacctctgacctgctgtcatcgtagaggtagaaagcaaacaatctggggctcagcacacctgggggtgctcccactcattcagtgtgtggggcccctgagcagaggctgggcattgccactaggacctgagctcctagagaacaaggacctgggtggcctcgcttactgttccagcccaggccaagcacagggtctggctcgtggcaaaccttgaataaatatttgttggctgaaaaaaaaaaaaaaaaaaaaaaaaaaaaaaaaaaaaa

SEQ ID NO: 3096 - DNA, 584 bp, Homo sapiens
ggcacgaggctccttgaggtcgctgtaggcttggtcgcctgaggctggggcagaccttcagggtcagcgaacagcaagatgcaaaggcaccacagacagctcagccatcccactgatggtgggagagacctgcttgctttttcatttgggagttacctgctccctggcctggaggagaagggagaaaacagaaaaaggagtaattcctaacatttgcatagcacaatctcatacaagggatttaatttccttagcaatcctatgttagtaactgtgaagcctcttaaaaaatgaggctctgggaagtcagatgtctggatgaagtttcacagcaaaggcacagtgtagttggactcgggcccatgcccactgcccaagcccctgtacattcctctaggctattgcatggaaggcacaggctcactggcatcggttccaaccagacagactcactcaggcagttccccaatatagggaaggctcgctggcacagaactattggttttgtttttagcagaatttacctgccttttgaatctttgcttaagggcacatttaaaattaagaaaaaaaaaaaaaaaaaa

SEQ ID NO: 3097 - DNA, 896 bp, Homo sapiens
  misc_feature (885)..(886): n equals a,t,g, or c
gaattcggcacgagcattcatcatctcgtagacagcagactctctaagaggaaaggttgtattgcaatacagtaatggggtctttaggcctggktgcaaaggtagaagaagatgatggtgatagtgatggtggtgatggtggtagtgatgatggtgatggtggtggtgatgatggctgtagtgctatatttctgtgctccttccggacccagccattgaaaactctctctccctaaactccctaacatccaatcttccctcaccaatcctggtcctaaaacccctgcttctaatgccttgtaagtgcttggtttctcttggcactggagcaagggagagctgggccctgtctaggggtgtgagatggggacagagcatgggcagggacaaagatggcctctcactgctggtcatagagttgaagtccccctggcaggaggccaggaagggagtggaaggggattctgcaggctccaggacctcctgctttcaaacaggcaggaccacaggtgtgagaggatggggagggagggggaaggggccttgccattgttgcctccctgcctgaaggtcccagggcaagcctcaaacgctggtccttcccagctctgcagctcaacaggtaatctgagacacacctgctaagcccctcgttattgacctcgtgttttgtagggtcacttgactccaacagccatacggttggtaattctaagcctctgagcccctggrcctggcaggatccctcatttttccctttccttcctgctttctaggcccccaccacccacccctktcccccctcccctcaagacacacaccactcagctccacacaacctgctgataaatagcaaaaaagaaaaaaaaaaaaaaaaaaactcgnnggggggtctc

SEQ ID NO: 3098 - DNA, 2878 bp, Homo sapiens
  misc_feature (205)..(205): n equals a,t,g, or c
  misc_feature (213)..(213): n equals a,t,g, or c
  misc_feature (840)..(840): n equals a,t,g, or c
tgatgatcaggatgaagggagcccagtcacccaagaacctgagctagcatcaggtggtggtggtagtggtggagttggcaaaaaggrgcagctgtctgtgaagaagyttcgagtagtactgtttgctctatgctgcamtacagaacaggcagytgaacacttccgaaatccccagcgacgtattcgccgttggcttcgacgtttncaggcctnccagggggagaatctagagggcaaatatctgagctttgaggcagaagagaaactggctgagtrggtgctaacccagcgcgaacaacagctacctgtaaatgaggagaccttgttccagaaggccaccaaaataggacgttctttggaaggggggtttaagatctcctatgagtgggctgtgcgtttcatgctgcggcaccacctgactccccatgcccggcgagctgtggcccacaccctacctaaggatgtagcagagaatgcaggactcttcattgattttgtacaacggcagattcacaaccaggacttacccttgtctatgattgtggctattgatgagatctctttgttcctggatacagaggtgctgagcagtgatgatcgaaaggagaatgccctgcagacagtgggcacaggggaaccttggtgtgatgtagtcctagccattctggcagatggcactgtccttcccaccctggttttctacagagggcagatggatcagcctgctaacatgccagactccatattgctagaggcaaaggagagtggctacagtgatgacgagatcatggagctgtggtcaactcgagtgtggcagaagcacacagcttgccagcgcanaaaggcatgcttgtgatggactgtcatcgcactcacttgtcagaagaggtactggctatgcttagtgcctctagcactttgcctgcagtggtcccagcaggctgtagctccaaaattcagccattagatgtatgcatcaaaagaactgtcaagaacttcctgcataaaaaatggaaggaacaggctcgggaaatggcagatactgcatgtgattctgatgtcctgcttcagctggtgcttgtctggctgggtgaagtgctaggtgtcattggggactgtccagagctagttcagcgctccttcctggtggctagtgttctgcctggccccgatggcaacattaactcacctacaagaaatgctgacatgcaggaggagctaattgcctccctagaggagcaactgaagctgagtggggaacattctgagtcttccactccacgacccagatcatctcctgaagagacaattgagcctgaaagtcttcaccagctctttgagggtgaaagtgagaccgagtctttctatggctttgaagaagctgacctagatctgatggagatttgagtgttggggtcatgagggggtgtggagtgggggtgggaacatgtgagggagggtaaaggggcttagggaaaagggggcataccaggtggggtatttggtttctattttttaattttataccaccactcccccctgaagttgacttacacttccctgtggatttgtggattaattaggaaaaccaatagtaatcacgtctgagccaaggagctggcccattggtcattcacttctgctaaaaacaggtttttgtgactttttttttttttaaatttaaatcactgtgtttggtatttttctgacaaaattaagaaaaagaaaaaaaattatttgtgggcaaatgttaaatttttttgtttccccttttacctcaattgtatcatagtactgggtttttttgtttgttttattgtgtggccaatgtctttgggcatgatgctatctaatcattgttaatgtgagaacatttctgaagatgggaaagacaaattatgtagctcacaaactggtttattatatatatggataaaaaacttttttcattgtggtcttaacacttttatataaaaatgaaaatggaaaaaaagtcccactgaactctctcttccttctccttttctttccttccctctccagagatgttggtttctacagcaaccctagatataaaattgtggctttaaaaatgcatgaaaccacctttaattatccagaatgaatagatttgtcttttcctcaccaccttccctccaaaacatgacataaacaatattttttgcacttgtgatccttggcccctttccccattctcaacaccatccatccctctggacaaaggatcatacaggtgttattagcaagcaagagatactgaagcgatcaaacagttttagggtggaagccattcccagtttgagtcttcatcctgtaagcccccaggggcagtccctgctttactgaacttcatcctgttagatggagagcatgcctgtttaagggattactggtcctacagccaggagctaattgttcaagaagtgttgaactttaaaaagacaagaccacttgttgaaatccagcgtgctctgtggctttcccctatttctcttaatacttagggaagaatctgacaggaagaagcgcacaggggtgtgcacaaagaaaatgacatgaatctttatttttcactgccagcttcaaggaaagaaaattttttctacaatttgcatgagggatttttttaattgtatgtactcatggttgtaaaccaaaacgtactgtaccgtacagagaaaaggagcaaaaaaccaagtcttctgtttatcctgaggctttccacaatgttcccctcctgtgagccaaggaggcaaactgcacaagcttgtaaatggttcgtctttaaaatgtacataagtggaacatttaataaaatgaggggaaatggaaaaaaaaaaaaaaaaaaaaaaaaaaa

SEQ ID NO: 3099 - DNA, 3179 bp, Homo sapiens
  misc_feature (49)..(49): n equals a,t,g, or c
  misc_feature (2993)..(2993): n equals a,t,g, or c
gctctctctctctctctctctctctctgctttcctcgcgagcctgcggntgggcttcttctcagaggaacgagaatgaatatgactcaagcccgggttctggtggctgcagtggtggggttggtggctgtcctgctctacgcctccatccacaagattgaggagggccatctggmtgtgtactwcaggggaggagctttactaactagccccagtggaccaggctatcatatcatgttgcctttcattactacgttcagatctgtgcagacaacactacaaactgatgaagttaaaaatgtgccttgtggaacaagtggtggggtcatgatctatattgaccgaatagaagtggttaatatgttggctccttatgcagtgtttgatatcgtgaggaactatactgcagattatgacaagaccttaatcttcaataaaatccaccatgagctgaaccagttctgcagtgcccacacacttcaggaagtttacattgaattgtttgatcaaatagatgaaaacctgaagcaagctctgcagaaagacttaaacctcatggccccaggtctcactatacaggctgtgcgtgttacaaaacccaaaatcccagaagccataagaagaaattttgagttaatggaggctgagaagacaaaactccttatagctgcacagaaacaaaaggttgtggaaaaagaagctgagacagagaggaaaaaggcagttatagaagcagagaagattgcacaagtggcaaaaattcggtttcagcagaaagtgatggaaaaagaaactgaaaagcgcatttctgaaatcgaagatgctgcattcctggcccgagagaaagcgaaagcagatgctgaatattatgctgcacacaaatatgccacctcaaacaagcacaagttgaccccggaatatctggagctcaaaaagtaccaggccattgcttctaacagtaagatctattttggcagcaacatccctaacatgttcgtggactcctcatgtgctttgaaatattcagatattaggactggaagagaaagctcactcccctctaaggaggctcttgaaccctctggagagaacgtcatccaaaacaaagagagcacaggttgatgcaagaggtggaaatgttctccatatcaagatgtggcccaaggggttaagtgggaacaatcattatacggactcttcagatttacagagaacttacacttcatctgttccacctctcctgcgatagtcctgggtgctccactgattggaggatagagccagctgtctgacacacaaatggtcttttcagccacagtcttatcaagtatcctatatgtattcctttctaaactgctactcatgaatgaggaaagtctgatgctaagatactgcctgcactggaatgttaaacactaaatatataacaagctgtgttttcctaagctgagatctgttgaataatgtttacattcgtcccccggggaaatgtatgctcagccaccattcaagagatgactgagaaggagatggtaagttcaagaagactgattgcacctgggacccaggccctttctttgggatccagtcccagccttcatccatgtgattaagatccaggccgctgaagttccccaggaaatgatcttccacttgagcaaccttttacttgatacgatttgcacctttctgttttcctgcagtcagggtggtggcctgcagggacctgagctttgctacccaaccagattcctcatagagattcctaatcactagtttcttgtattcataaactcagagatacagagggcttggtttgaagttggggtgagatgaaacctttgctctgagccaaagctctggggccttgcattccctgcattgggttgatgactgtcagcatcactgccgcagcatgcttgactaaggtacctggttttagccacagccacctccttgtatgttacctttcagctctggccaagagtgggacagggttttaaccacaaataggagcagcatgcaattcctagtgacttgctgcacagtattgtatcataattacaggaagtttttatttttaaaactggatctggggtatattcatttgccccatcacctctgtctaaaggcccaagtcctagggctgccatggtcacaagcacactgatgctccttaagattgtttatctggagcccacatagtgtggaacaaaaagtcacctagaaagcatccttggtcatcattgtctccttcccacctggcccagagatgcttaaatccaagttgtttctccagctgtcacctcccccaggagatcaggattccactgacgtcctgggcagccagtgaatttaattttccatgagaaacaacagagttaacctgtggcattaggagacctacttcatgtggaccctttttttccttcagtttaacttttctggagcagtgtgctgcgtagttcggcctgagtttgtgcagcttgttaagacaactcttgtgtacgctatgttgaagctcaacaaaaaagtcatgggaccacttctagaaatctttcagctgtcaggcctgtcagtctcatgacagtttgttggttgtgccaaacactttatttgggaaaggaaagcccagatttgaatgggtctttcccctgggccttatcctatagaggcatttgtaatatggagaaaataatttttcatttttgctcatttaattctataaattctctttataaatgaattttgtgttctttagttctccttaaaagaacttttgaattataaaaataaaatctttacctgtcgaattgttgctgcagatgattgttgtggaaaatctggatcattgacctctgtgctttcattcctagagatgttttatagttacatgagcaaaagctgttgccccaaagtgatggccctggaggcggggctgaggaacagggaaatgccgctgtgaagtcttaaagcacttctgcttaaactccnatgtgtgaggagtgtgcctccctgtgccctctcagctctgaggctggccgtctttcggggtgttccttttggcaaatatacactgtaatcttgagtctaaatttatatgttgaaatgctaccttttttaaaataagaaactaaataaaattattttactatcaaaaaaaaaaaaaaaaaactcgag

SEQ ID NO: 3100 - DNA, 1411 bp, Homo sapiens
ggcacgagctgtaccaaggcttcagagtgagcagggggacatctggataggttagccagggccacagagagaagagctgcttacacctgaattgtttcacccttttcaagaacagggttgtccttctccccatctggatccttgggctagatctctgccgaggggctccgtcaagtcccgcaaggctagagaagggagccccacatcatttccactttcaaagagggaagatgctcgtcattcaaattacttctgttgatttccatggtatccccctgtccgtcccacaatctcttaccaggcgtcaatgcacatgcaggggatggaaagaggatgagccgatgagcagactttgcattaatcaaggagaaagaaaaagcagatggaaggaggtaggtagatggagaaagcaacagctccttttagcccttgatgacggccctgaaggcctgtctcttttagtgactcctctttgggtcctcttcccctacctctcagtgactaggttcctcatattaattccctgctgtgagtttggctccttgtgctgggcaattcagtcatcctcagaaagagcaaagttggtcttggaattaaggtgcaggtggggaaaaagaggactcagctagacacgaagaaaggctctcttcccagtctaagcccttctaccgtaaggggcattttatcaagacagccacccaactccccatcccatctcccctcctttgtagaaacagcatttgactcaccaagcctttctctccctttccgtgtgtcttgcttagtttctggattgagagaatttctatccttgctccctcgaactctaaaagagcttcttttgaaaactggggagtatcaggcctacctctacatgtgcaacagtgccaggattcaaaggaaaagctcattccagcctctgcctcttgggagatggttcagagtgccacatagggactgaaagagggtgtctgaatccttcaggaatgctttaagtgacattgttgaaaagagataaagaaaaggaaaacaatggaattgggtttctaaggtccctggaaatatcctgggggtctaattgagaaagaaaataagaggaaatttgaagactcacttcttccttcatctgaatccactcagatggcaactgatctctgtcccaaggaccctctaccccacccaattcataatcatctcagattagaaaaggcagaattccttcccattctcaaatcagcatttgggttaggggcccctaagttacgtgagcatgttagaaatgtgaccccaggcctcaagagagaggctctgccacatgagaggagataggaatcatgactgaaaggggattagcacagaacagagaaaactgatttgatagacaaatcaaatagaaaaaaaaaaaaaaaaa

SEQ ID NO: 3101 - DNA, 1065 bp, Homo sapiens
ttttttttttttttttttttttttcccaggagtcaacactttattttgttcaggccaaccacactgggagcccagcatccccgcaggataatgcctctgtgggctcatctcgcctcttgagggtggccatgctggctggctctggccaccggggaggcctggccagtctctctgtctccaagttattgtagagtcgggaagtcttcaagggcagcttcaaggaggctgaactggttcctamttctggaggtatttcttcattatgctcgcaacatcgtcgtctttcctccccgtccctggctctctccgctcgggggacgttcgctcgccaccgtcacccgcaagtcgtgggattcctggtcgacttttgatgctgtcagcacttttgaaggacacgatggagccggaggatgaggacgagtcagacaggtgagcgggatcctccttgggctccgggctcttcttcaaaatggtcttgatccccgagagaaaggaacggttagcctcttccgtttcaaagtggatgcttgaacgctgtgaaccgtcttgcccacctttggctgatccagccaaggaggtaggtgtctggggcttccggatagctgggaggaagtcatcgaagtccactttggtcttgcgttcgtagtcgaggcttgggagtttccagctgaatgggtcactgcctagaggttcctccatcaggtgggcaaactggcggttctggaaaacaagcggctcctttccaaggtctggacagcccgcatcgtccacagaggactccagacaccgcctccgaggacgcagtgtgggcgacaacagcatgtccctgggtgtggtcggagagctcagttttctccccatgctcggtctggattctaagagggactcgcaggaactgaatcgggttttcgacttttcggggagtagggttgtgcccccaacaccgtctgaagagatgcatttgaggctggtggacctcaagagaccaccagcggccccttcgatttccaggggtgactttgccccaaccctcagcgagaggtttccctcgtcactgctcgtgcc

SEQ ID NO: 3102 - DNA, 2178 bp, Homo sapiens
agactgtagtctcttgggaccttggtcacttctggcctgccctgcaccgaccagtaactgtgcctgatgactggaggtatggggaattcaccggactttattgttctttgtaggaatcaaagatcaactcccactgaggacaaatggacctgtaattccgggtgtgacgagagaacgtgatttaccttcctgaattaaaaaacaggtcattaagcttgggccctgactcttctttgtgagaaggtacagagatggaaaccttacaatccgagactaaaacgagggtccttccctcatggctgacagcccaggtggctacaaagaatgtggcaccaatgaaggcccccaagaggatgagaatggcagcagtgccagtggcagcagcaaggtgcgacagctctggtcagaagactcctgcgaatctgactccctgcgacaaggactgtgtactgcatgaatgaggctgagatagttgatgttgctctgggaatcctgattgagagccgcaaacaggaaaaggcctgcgagcagccggccctggcgggggctgataacccagagcactcccctccctgctccgtgtcgcctcacacaagttctgggagcagcagtgaggaagaggacagtgggaaacaggcactggctccaggcctcagccttcccagaggccgggcacgcgcagctctgcctgtagcaggagccctgaggaggaggaggaagaggatgtgctgaaatacgtccgggagatctttttcagctagggcataaactgtgcactgaactgtctgccgagagcagctggaggacagctgagcttccactggtgctgctgggccgcccgcctgtgggaatggggctctctgtgctcctacctttgtgccttcttgggcctggcagattcacctcaggccagaagcccctggacactccgggccttggggctgccgttctgagtgtgcggaaggcaggactcaaaatgagatcccatttgactccctctgtatgtactgtgccctctcctggctcttgaggctctggagtcccaattgtctgtgttagtcagtgaccaggttccagggaaaatgatgtcatgtggtggtccaacttactggaaccaaagagacagtactttgcaaagaaaaggatcactgccaggtgcactggaattgctacagtttagtccgcatgatctctcctgaaggaggaagcctgtttcaaaaatagtttccatcatgagtctatcaatgagctcccacctctccagccagcctagaaagcaaacgagctgcccacagttctctgccctgtctgggaggttgaggccacagtgtatagactggtaagccagacaggcctcctcccgcaagctgctaccttgctttcacctgtaccttggtccccgggcagctagctataaagcaagagggacaggagcccagaagagacactgaggacaagagatcacaccagagtacatgtctctgcctctgttttcagtgtggctttggacaggaatatatgaataaatcactgccatacaggttttccaatacacaagtgctagaaaatacacacaattccccaatgcgtaagttgtgctaatgtctttccaagttctgggttgggaagtggagggtggcagcgtttgtttgtgcgcaaccgtccagtcctgttcacagcgaggatttggagtcctccagggtctcatcatgggagtgatttgtcagcggacgcctctgccctgtctggcttcaggtccagggaagctttgaagcagtcaaagccttgtctttgtaccccatgtgtcctgtctttgttgagtcactcagagatcactcctggacctctggggttggagttccagtgatggcttatggcggcccactcactatggtgggctgagtggaagctccttaaccatgtccccagagacactgaggtgctcgctcttttaatgtcctcgtttgttgccgtaagttctttgctaggtttcattttggcatttggcaaatcagcctggaagtctggccccatgacagcaatcactccctccccaccctcctgaagctagaggaagatttgctcagatccattaataaagcaggaattggtgttgacaatgagctgcatggtttagggagtctttgggagccttggaagtcctgaaggacagacaat

SEQ ID NO: 3103 - DNA, 2469 bp, Homo sapiens
  misc_feature (779)..(779): n equals a,t,g, or c
  misc_feature (788)..(789): n equals a,t,g, or c
  misc_feature (792)..(792): n equals a,t,g, or c
  misc_feature (1020)..(1020): n equals a,t,g, or c
  misc_feature (1022)..(1022): n equals a,t,g, or c
  misc_feature (1027)..(1027): n equals a,t,g, or c
ggcacgagcaggaccggcagccggcaagatgcgaccgccctgcccagcatgtcctcaactttctgggcgttcatgatcctggccagcctgctcatcgcctactgcagtcagctggccgccggcacctgtgagattgtgaccttggaccgggacagcagccagcctcggaggacgatcgcccggcagaccgcccgctgtgcgtgtagaaaggggcagatcgccggcaccacgagagcccggcccgcctgtgtggacgcaagaatcatcaagaccaagcagtggtgtgacatgcttccgtgtctggagggggaaggctgcgacttgttaatcaaccggtcaggctggacgtgcacgcagcccggcgggaggataaagaccaccacggtctcctgacaaacacagcccctgaggggccccgggagtggccttggctccctggatagcccacgtctcagccacagttctccactcgcctcggacttcacccgttctctgccgcccgcccactccgtttccctgtggtccgtgaaggacggcctcaggccttggcatcctgagcttcggtctgtccagccgacccgaggaggcggactcagacacataggcggggggcggcacctggcatcagcaatacgcagtctgtgggagcccggccgcgcccagcccccgccgaccgtggcgttggccctgctgtcctcagaggaggaggaggaggaggcagctccggcagccacagaaggctgcagcccagcccgcctgagacacgacgcctgccccangggactgtnntgnacagaagcggcctcctcccgtgccccagactgtccgaattgcttttattttcttatactttcagtatactccatagaccaaagagcaaaatctatctgaacctgggacgcatcctcactgtcagggtccctggggtcgcttgtgcgggcgggaaggcaatggtggcagaaacatgctggtggccccggcggagcggaaaaggcggccgtggtggaagcctccaccccntnatcancccgcacaccctctgaaggacgggcttcggctgcccggaagccgtggcacacctgcgggaggcagcgacggtccccacgcagaccccgggaacgcatgccgctttattcctctgtacttagatcaacttgaccgtactaaaatccctttctgttttaaccagttaaacatgcctcttctacagctccatttttgatagttggataatccagtatctgccaagagcatgttgggtctcccgtgactgctgcctcatcgataccccatttagctccagaaagcaaagaaaactcgagtaacacttgtttgaaagagatcattaaatgtattttgcaaagcctaaagtatatatttaacagtttttatatgttgtatatttgtagaaaatcctatttaacaattaacgtggcagtcccggccgtcctgagagtcgggccgagccccgtgtgtttctgaagactctgggggtgggacacggcggggaggtggtgccccgcggaccccggggtgccaggcacggaaggcgggactctgggagaagcgtgcggaggaccgtggcgtcggcgttccggatgtgtcggtcgtgcccggggaggccgggttcccctcgctgcgggccaggcttggctcctgattccctctctggtccctgtattggtcaacacttgagcgtacaatatcttgaacatgcttcttccaatgggttttgtttcccatttcctgcccctttcgccactcacggaccttgaggccagttgacggcccttctccccacgcctgtgtccccgcgttctgagaagtcctctgtcttcgtgtcactaggtccagaaagtcgcgccgggcagaggcgcaggcggggccggcagggccgaggaataagcgacaattctggtttttctcccctggccgtcgttcgccagcctccttcattttcctgagttcccgctgaagtatatactacctatgagtccaattaacatgagtattatgctagttctatcatactaaaaaaaacgtaaaaaaataactatatagaagctgttccagcaaccatagactgaagatacgaaagaaaatccatttatttaagacctgttccggtatccatgaggacataatttacctttcagtcaccacaaatttataggcatttgtatcctggactaaaaggagggggctgaggttgggtttgtcatcacagagggggtgggcctggaaagggtccttcccaagctgccccgggctccggcggcccgggccggcagcttctgccagccagcgttcctcacggcctccccctcgcctgtttcttttgaaagcaagtgtagacaccttcgagggcagagatcgggagatttaagatgttacagcatatttttttttcttgttttacagtattcaattttgtgttgattcagctaaattatgaaaaataaagaaaaa

SEQ ID NO: 3104 - DNA, 1464 bp, Homo sapiens
cattttgggaatctcccatgtcaacatcaagctgcgtgcccacgggcaggtagagcgccatcttaatgaggggctccaggtcagggaggcgtggcacagctggtgatcaaaggcgcccgggactcagagcgggagcccagcagggcctgagcagagcctccgctgaactgtggaccccagactccgagcccaccccaaggccgctggcactggtgttcaaaccctcaccacttggagccctggagctgctgtccccccaacccttggttccatatgccgcagacccatagccgcctgcaaggcagagaggacacaggagagccacccctgagtgccgaccttgggtggcggggcctgggtctctcgtcccacccggagggcacagacaccggcttgcttggcaggctgggcctctgtgtcacccactcctgggtgcgtgcagacccttcccctccaccccccaggtcttccaagctctgcttcctcagtttccaaaatggaaccacctcacctccgcagcacccgacttaccaggacgcatgcccctccctctgccctcatcaaacccacagacccggactccctttctgccaccccaggctggtccggccccaggtgtgggtccgctctctccactcccagggctccgcgcccaagtgagggggcccctgccggagcctcagacacactccagttcagggctgtggggggccttggccacatacctgtcccttggctatgagcaggctttgggggcccttccgcggcagccccgggggccgaggtagggtcgggggcttagaggctgggatggctcctggccccaccgccagggggcagcgcaggccgggctgggaggcggcggcggcggctcgggctggggggtcaggtggacgctgccctccggggctggtcgcgcatccctcagtccctcggccacccgggggtcgctccctcgtgcccaccgcacctgccgagcctctttggacccagatctgttcatgcttttgtcttcgtcactgcggcggggccctttgatgtcttcatctgtatgggggtggaaaaatcaccgggaatcccccttcagttctttgaaaaagttccatgactcgaatatctgaaatgaagaaaacaaaccgactcacaaaaaaaaaaaaaaaaaaaaaaaaaaaaaaaaaaaaaaaaaaaaaaaaaaaagggcggccgttagaggatccaagcttacgtacgcgtgcatgcgacgtcatagctcttctatagggtcacctaaattcaattcactggccgtcgttttacaacgtcgtgactgggaaaaccctggcgttacccaacttaatcgccttgcagcacatccccctttcgccagctggcgtaatagccaaaaaggcccgaccgaatcggcccttccaaacagttgcccaaccctgaatgggccaaaatggggaacgccgcccttgtaacggg

SEQ ID NO: 3105 - DNA, 1122 bp, Homo sapiens
ggcacgagtccaggccggagccaggggccccactgttgggatgctggctgcagtggggcgccccaagcccaggtcccctctgtcttctctttcgactttgcagctgtacttgttttgctcctctacccgcaggagctgacatggacccaaatcctcgggccgccctggagcgccagcagctccgccttcgggagcggcaaaaattcttcgaggacattttacagccagagacagagtttgtctttcctctgtcccatctgcatctcgagtcgcagagaccccccataggtagtatctcatccatggaagtgaatgtggacacactggagcaagtagaacttattgaccttggggacccggatgcagcagatgtgttcttgccttgcgaagatcctccaccaaccccccagtcgtctggggtggacaaccatttggaggagctgagcctgccggtgcctacatcagacaggaccacatctaggacctcctcctcctcctcctccgactcctccaccaacctgcatagcccaaatccaagtgatgatggagcagatacgcccttggcacagtcggatgaagaggaggaaaggggtgatggaggggcagagcctggagcctgcagctagcagtgggcccctgcctacagactgaccacgctggctattctccacatgagaccacaggcccagccagagcctgtcgggagaagaccagactctttacttgcagtaggcaccagaggtgggaaggatggtgggattgtgtacctttctaagaattaaccctctcctgctttactgctaattttttcctgctgcaaccctcccaccagtttttggcttactcctgagatatgatttgcaaatgaggagagagaagatgaggttggacaagatgccactgcttttcttagcactcttccctcccctaaaccatcccgtagtcttctaatacagtctctcagacaagtgtctctagatggatgtgaactccttaactcatcaagtaaggtggtactcaagccatgctgcctccttacatcctttttggaacagagcacggtataaataataaactaataataatatgccaaaaaaaaaaaaaaaaaaaaaaaaaaaaaaa

SEQ ID NO: 3106 - DNA, 3357 bp, Homo sapiens
caccagcagtagtagcagaagcgaagagcgcaaacgcaaccgctctccccgcgcgttggccgattcattaatgcagctggcacgacaggtttcccgactggaaagcgggcagtgagcgcaacgcaattaatgtgagttagctcactcattaggcaccccaggctttacactttatgcttccggctcgtatgttgtgtggaattgtgagcggataacaatttcacacaggaaacagctatgaccatgattacgccaagctcgaaattaaccctcactaaagggaacaaaagctggagctccaccgcggtggcggccgctctagaactagtggatcccccgggctgcaggaattcggcacgagaggcagcggcagctccactcagccagtacccagatacgctgggaaccttccccagccatggcttccctggggcagatcctcttctggagcataattagcatcatcattattctggctggagcaattgcactcatcattggctttggtatttcagggagacactccatcacagtcactactgtcgcctcagctgggaacattggggaggatggaatcctgagctgcacttttgaacctgacatcaaactttctgatatcgtgatacaatggctgaaggaaggtgttttaggcttggtccatgagttcaaagaaggcaaagatgagctgtcggagcaggatgaaatgttcagaggccggacagcagtgtttgctgatcaagtgatagttggcaatgcctctttgcggctgaaaaacgtgcaactcacagatgctggcacctacaaatgttatatcatcacttctaaaggcaaggggaatgctaaccttgagtataaaactggagccttcagcatgccggaagtgaatgtggactataatgccagctcagagaccttgcggtgtgaggctccccgatggttcccccagcccacagtggtctgggcatcccaagttgaccagggagccaacttctcggaagtctccaataccagctttgagctgaactctgagaatgtgaccatgaaggttgtgtctgtgctctacaatgttacgatcaacaacacatactcctgtatgattgaaaatgacattgccaaagcaacaggggatatcaaagtgacagaatcggagatcaaaaggcggagtcacctacagctgctaaactcaaaggcttctctgtgtgtctcttctttctttgccatcagctgggcacttctgcctctcagcccttacctgatgctaaaataatgtgccttggccacaaaaaagcatgcaaagtcattgttacaacagggatctacagaactatttcaccaccagatatgacctagttttatatttctgggaggaaatgaattcatatctagaagtctggagtgagcaaacaagagcaagaaacaaaaagaagccaaaagcagaaggctccaatatgaacaagataaatctatcttcaaagacatattagaagttgggaaaataattcatgtgaactagacaagtgtgttaagagtgataagtaaaatgcacgtggagacaagtgcatccccagatctcagggacctccccctgcctgtcacctggggagtgagaggacaggatagtgcatgttctttgtctctgaatttttagttatatgtgctgtaatgttgctctgaggaagcccctggaaagtctatcccaacatatccacatcttatattccacaaattaagctgtagtatgtaccctaagacgctgctaatcgactgccacttcgcaactcaggggcggctgcattttagtaatgggtcaaatgattcactttttatgatgcttccaaaggtgccttggcttctcttcccaactgacaaatgccaaagttgagaaaaatgatcataattttagcataaacagagcagtcggcgacaccgattttataaataaactgagcaccttctttttaaacaaacaaatgcgggtttatttctcagatgatgttcatccgtgaatggtccagggaaggacctttcaccttgactatatggcattatgtcatcacaagctctgaggcttctcctttccatcctgcgtggacagctaagacctcagttttcaatagcatctagagcagtgggactcagctggggtgatttcgccccccatctccgggggaatgtctgaagacaattttggttacctcaatgagggagtggaggaggatacagtgctactaccaactagtggataaaggccagggatgctgctcaacctcctaccatgtacaggacgtctccccattacaactacccaatccgaagtgtcaactgtgtcaggactaagaaaccctggttttgagtagaaaagggcctggaaagaggggagccaacaaatctgtctgcttcctcacattagtcattggcaaataagcattctgtctctttggctgctgcctcagcacagagagccagaactctatcgggcaccaggataacatctctcagtgaacagagttgacaaggcctatgggaaatgcctgatgggattatcttcagcttgttgagcttctaagtttctttcccttcattctaccctgcaagccaagttctgtaagagaaatgcctgagttctagctcaggttttcttactctgaatttagatctccagacccttcctggccacaattcaaattaaggcaacaaacatataccttccatgaagcacacacagacttttgaaagcaaggacaatgactgcttgaattgaggccttgaggaatgaagctttgaaggaaaagaatactttgtttccagcccccttcccacactcttcatgtgttaaccactgccttcctggaccttggagccacggtgactgtattacatgttgttatagaaaactgattttagagttctgatcgttcaagagaatgattaaatatacatttcctaaaaaaaaaaaaaaaaaactcgagggggggcccggtacccaattcgccctatagtgagtcgtattacaattcactggccgtcgttttacaacgtcgtgactgggaaaaccctggcgttacccaacttaatcgccttgcagcacatccccctttcgccagctggcgtaatagcgaagaggcccgcaccgatcgcccttcccaacakttgcgcagcctgaatggcgaatggcaaattgtaagcgttaatattttgttaaaattcgcgttaaatttttgttaaatcagctcattttttaaccaataggccgaaatcggcaaaatcccttataaatcaaaagaatagaccgagatagggttgagtgttgttccagtttggaacaagagtccactattaaagtgttcaccgcggtga

SEQ ID NO: 3107 - DNA, 2443 bp, Homo sapiens
  misc_feature (41)..(41): n equals a,t,g, or c
  misc_feature (77)..(77): n equals a,t,g, or c
  misc_feature (2326)..(2326): n equals a,t,g, or c
  misc_feature (2348)..(2348): n equals a,t,g, or c
  misc_feature (2375)..(2375): n equals a,t,g, or c
  misc_feature (2434)..(2434): n equals a,t,g, or c
ttatagtcctgtcgggtttcgccacctctgacttgagcgtngatttttgtgatgctcgtcaggggggcggagcctanggaaaaacgccagcaacgcggyctttttacggttcctggccttttgctggccttttgctcacatgttctttcctgcgttatcccctgattctgtggataaccgtattaccgcctttgagtgagctgataccgctcgccgcagccgaacgaccgagcgcagcgagtcagtgagcgaggaagcggaagagcgcccaatacgcaaaccgcctctccccgcgcgttggccgattcattaatgcagctggcacgacaggtttcccgactggaaagcgggcagtgagcgcaacgcaattaatgtgagttagctcactcattaggcaccccaggctttacactttatgcttccggctcgtatgttgtgtggaattgtgagcggataacaatttcacacaggaaacagctatgaccatgattacgccaagctcgaaattaaccctcactaaagggaacaaaagctggagctccaccgcggtggcggccgctctagaactagtggatcccccgggctgcaggaattcggcacgagtttgtatttatattgaatgcatcccttccttaccatatgttagcaacctgtgcagaagccctacccagacctaactgggaactggctctgtatatcatcatctcaggaataatgagtgcactgtttcttttggtcattggaacagcctatttggaagctcaaggaatatgggagccatttcgaaggcggctatcctttgaggcctcgaacccgcccttcgatgtgggaaggccatttgatctcaggagaatcgttggtatttcatctgaaggaaacttgaacacactcagctgtgaccccggtcacagtagggggttctgtggagcaggcggttcatcatcccgacccagtgccgggagtcataagcagtgtggcccatcggtccacccacacagcagtcacagcaatagaaactcagctgacgtggaaaacgtcagagccaaaaacagttcaagtacctctagtaggacttctgctcaagcagcttcttcacagtctgctaacaaaacaagcccccttgtcttagattcgaacacagtgactcaaggtcatacagcgggcagaaagtccaaaggggcaaagcagagccagcacggcagccagcaccatgcccacagcccgctggagcagcaccctcagcctcctctgccaccgccagtgcctcagccccaggagcygcagcctgaaaggctgtctcccgcccccctcgcacacccttcccacccagaacgtgccagcagcgcgaggcacagttccgaggactcggacatcaccagtctcatagaagccatggacaaagacttcgaccaccatgactccccagccctagaagtgtttacagagcagcctccatcgccattgccaaaaagcaaagggaaaggaaaacctcttcagcgcaaggtgaaaccacctaagaagcaagaggaaaaggagaagaagggaaagggaaagccacaggaagatgagctgaaggactctttggctgatgatgatagctcctccaccaccacagagacctccaaccctgacacagaaccgctcctcaaggaggatacagaaaagcaaaagggaaaacaagccatgcctgaaaaacatgaaagtgaaatgtctcaagtgaagcaaaaaagcaaaaaactcttaaatattaagaaagaaatcccaacagatgtgaaacccagttcattagaactaccatatactccccctttggaaagtaagcaacgtagaaatctcccaagcaagattcctcttccaactgcaatgacaagtggatccaaatcacgaaatgcccagaaaacaaaaggtacaagtaagttagtggataacagaccacctgccctagcaaaattcctcccgaatagtcaagaattaggcaacaccagtagctcagagggtgaaaaagactctcctccaccggagtgggattccgttccagttcacaaacctggcagctctactgatagtctttataaactttctctgcaaaccctcaacgcagacattttcttaaaacaacgccagacctcaccgacacctgcttccccgtctcccccagctgccccctgcccctttgtggcccggggcagctacagcagcatcgtcaacagcagctccagcagtgaccctaaaataaaacagccaaatggaagcaaacacaagttgacaaaggcagcctcgctyccgggcaagaacggcaaccccayttttgctgcartcacggctnggctacgacaagagcccaggtngggaatggctttgcttaaagtttcttncaaacaaaacaggtttyttcmagcagccttkgggwwtttmacagsttctgkttgacagnggtgggttt

SEQ ID NO: 3108 - DNA, 1599 bp, Homo sapiens
tcccgggtcgacccacgcgtccggcgaggctgggttacgtgaggaagctgggggtttcgcgggcagctttagagccccagtcagggaaaccgaggccgggcttcctggctgcctcgcgagcctcttcatggctctcgccgccgccctgaggtgcctagaatgggttccggcctccggggaggttcccagtaaccgcaggagccaccattgatttggcgtctgctgggtgcaaagcccagcgcgctaaccctttactcgcgacctttcgcttcaccttcacagcagccctgcgaggagagttgtggactggggcaacctttgccagtgatgagaagtgatgctcgtggcagtgctgaatctctctgaatatgattcgaattgcagccttaaatgccagctccaccattgaggatgatcatgaaggaagctttaaaagtcacaaaacccagacaaaggaggctcaggaagcagaggcttttgcattgtaccacaaggcccttgatctgcagaaacatgaccggtttgaggagtctgccaaagcctaccatgagctcttggaggcgagcctgctgcgggaggcagtttcatccggtgatgagaaagaggggttgaaacaccctgggctgatactgaaatattccacttataagaacttggcccagctggcagcccagcgggaggatctggagacagccatggagttctacttagaggcagtgatgctggactccacagatgtcaacctctggtataagattggacatgtggccctgaggctcatccggatccccctggctcgccatgcttttgaggaagggctgcggtgcaatcctgaccactggccctgtttggataacctaatcactgtcctgtacaccctcagtgattacacaacatgtctgtacttcatctgcaaagctttggagaaggattgccggtacagcaaagggctggtcctcaaggagaagatttttgaggagcagccttgtctccggaaggactctctcagaatgttcctcaaatgtgacatgtcgattcacgatgtttcggtgagtgcagctgagacacaggcgattgtagatgaggccttggggctgcgaaaaaagaggcaagcgctgattgtgcgggagaaggagccggacctgaaacttgtgcagccccattccttcctttcttcacctggaagtgcctcggagagagcttgctggccatgtacaatcatctcaccacctgtgagcccccacgtcccagccttggcaaaaggattgatttgtcggactaccaggaccccagccagcctcttgagtcctccatggtggtgacgccagttaacgtgatccagccaagcactgtcagcaccaacccagctgtggctgtcgccgagcctgtggtctcctacacctctgtggctacaaccagcttcccactgcacagtcctggtctgttggagacaggcgctcctgtgggtgatatttctgggggagataaatccaagaaaggggtaaaacggaagaagatttcagaagagagtggagaaacagcaaagcggcggtctgcccgtgtccgaaacaccaagtgcaaaaaaaaaaaaaaagggcg

SEQ ID NO: 3109 - DNA, 2175 bp, Homo sapiens
acgcgtccgcctactgataacttggtacccactattttggataaagctcataaatataacctaaaggttacttttcacatagaaccatatagcaatcgagatgatcaaaacatgtacaaaaatgtcaagtatattatagacaaatatggaaatcatccggccttttacaggtacaagacgaagactggcaatgctcttcctatgttttatgtctatgattcctatattaccaagcctgaaaaatgggccaatctgttaaccacctcagggtctcggagtattcgcaattctccttatgatggactgtttattgcccttctggtagaagaaaaacataagtatgatattcttcaaagtggttttgatggaatttacacataattttgccacaaatggctttacttatggctcatcacatcagaattgggctagcctaaaattattttgtgataaatacaacttaatatttatcccaagtgtgggcccaggatacatagataccagcatccgtccatggaacacgcaaaacactcggaaccgaatcaatgggaagtattatgaaattggtctgagtgccgcacttcagacacgccccagcttaatttctatcacctcttttaatgagtggcatgaaggaactcagattgaaaaagctgttcccaaaagaaccagtaatacagtgtacctagattaccgtcctcataaaccaggtctttacctagaactgactcgcaagtggtctgaaaaatacagtaaggaaagagcaacttatgcattagatcgccagctgcctgtttcttaatgcattgattaaagtttaatagttatcaaaatcacctaatttttaaaaatagctttcgttttgagttctggaaagaaaactgtcaaaatcagtatatactattagttatatttaaaaatatttttttaaattctttacagataatattatacttgttacccttcacaataccacatgagaaaatatctgagacaaaatgtatacaaatatattccttatggcataatttattgcatttctgactgaaatcaaaattctgatttgatggcaattgaattttcattttacaatagataaatgcttgtgctacctaaagcacttagcacacagttaaattatatttacatcctagacccaaataaataggattgtgtgtatatttgggatatctattgaagaaaaaaagaaaaccccttaaagataatgtacatgcttcatgtcatgtctttaaaataatttaatcaactttattgtcttagtatttagactctggataactctacaataatgaggaaattcttaagaataacaaaatcactgtaccttcctctcaattttgctgtgaacctgaaatggctttaaattaatactcttattttttatttaatttaattacataaattaaaccttaccatgaccaaattgtgttaggacggcctgctatctacagcacagtgtgtcatttgcagatttgtggttacctataccacgctaggtgttttgacatgttttagtgttttctgctttacagtgctgaaattccatatttttagaaagctatgaaagtccttttatgaaaaagttactgattgcttctcagttattaggaaaacagttgtttccccattattatgtagatatgatgccccaatatcatttttagtatatcttgtcgatctttaagttgttactattgtgttattcatgtctttaaatcagataccaaatattttttaggaaagaaaaatgttattactgtcattaggttgtcttttaatactttaagttattttgacgaaaagtaatagagaaaatttacttagcattttagattctagagacatggaaatgaaaattattttatgtctagagtaggtcctgaagtttggctttacattaagtttagcactgtatcagaatgaagaaactaatattttacataaaaactaatactttcaattttttatatagtaatatccccattttgtaaatgttagacttttatcatacctgtaagttaaaatacttgttatcaataacttgtcatgttgtgacaaattgatcacttgtgtacgaaaaataaatctccttaaaaactaaataaaatgcactgtattcttaaaaaaaaaaaaaaaaaaaaaaaaaaaaaaaaa

SEQ ID NO: 3110 - DNA, 1603 bp, Homo sapiens
ggcacgagcggcacgagcagccttcctcccccagcctgagtgactactctattccttggtccctgctattgtcggggacgattgcatgggctacgccaggaaagtaggctgggtgaccgcaggcctggtgattggggctggcgcctgctattgcatttatagactgactaggggaagaaaacagaacaaggaaaaaatggctgagggtggatctggggatgtggatgatgctggggactgttctggggccaggtataatgactggtctgatgatgatgatgacagcaatgagagcaagagtatagtatggtacccaccttgggctcggattgggactgaagctggaaccagagctagggccagggcaagggccagggctacccgggcacgtcgggctgtccagaaacgggcttcccccaattcagatgataccgttttgtcccctcaagagctacaaaaggttctttgcttggttgagatgtctgaaaagccttatattcttgaagcagctttaattgctctgggtaacaatgctgcttatgcatttaacagagatattattcgtgatctgggtggtctcccaattgtcgcaaagattctcaatactcgggatcccatagttaaggaaaaggctttaattgtcctgaataacttgagtgtgaatgctgaaaatcagcgcaggcttaaagtatacatgaatcaagtgtgtgatgacacaatcacttctcgcttgaactcatctgtgcagcttgctggactgagattgcttacaaatatgactgttactaatgagtatcagcacatgcttgctaattccatttctgacttttttcgtttattttcagcgggaaatgaagaaaccaaacttcaggttctgaaactccttttgaatttggctgaaaatccagccatgactagggaactgctcagggcccaagtaccatcttcactgggctccctctttaataagaaggagaacaaagaagttattcttaaacttctggtcatatttgagaacataaatgataatttcaaatgggaagaaaatgaacctactcagaatcaattcggtgaaggttcactttttttctttttaaaagaatttcaagtgtgtgctgataaggttctgggaatagaaagtcaccatgattttttggtgaaagtaaaagttggaaaattcatggccaaacttgctgaacatatgttcccaaagagccaggaataacaccttgattttgtaatttagaagcaacacacattgtaaactattcattttctccaccttgtttatatggtaaaggaatcctttcagctgccagttttgaataatgaatatcatattgtatcatcaatgctgatatttaactgagttggtctttaggtttaagatggataaatgaatatcactacttgttctgaaaacatgtttgttgctttttatctcgctgcctagattgaaatattttgctatttcttctgcataagtgacagtgaaccaattcatcatgagtaagctcccttctgtcattttcattgatttaatttgtgtgtcatcaataaaattgtatgttaatgctggaaagaaaaaaaaaaaaaaaaaaaa

SEQ ID NO: 3111 - DNA, 1177 bp, Homo sapiens
  misc_feature (1071)..(1071): n equals a,t,g, or c
  misc_feature (1164)..(1164): n equals a,t,g, or c
gaattcggcacgaggttcggcgaagatagggaataaggaagcacaggagtaggggagaaggaagcacaggagtaggggagatatacagcggtcaggataagggggaaagggcggtggttgcgcaagaggtgaaacaagatgtgagagacaaggggtagggaagaaatggggcagcggttaggttcagaagcgcatagaccgtggcggacgggcaatgcgaggggcacagaaaggaactgaggggtgggctatttaaggagatggtcctcagccctctcttttctgcgtaggtctcctcctccaggccgcgcgcggatatgtcgtccggaaaccagcccagtctaggctggatgatgacccacctccttctacgctgctcaaagactaccagaatgtccctggaattgagaaggttgatgatgtcgtgaaaagactcttgtctttggaaatggccaacaagaaggagatgctaaaaatcaagcaagaacagtttatgaagaagattgttgcaaacccagaggacaccagatccctggaggctcgaattattgccttgtctgtcaagatccgcagttatgaagaacacttggagaaacatcgaaaggacaaagcccacaaacgctatctgctaatgagcattgaccagaggaaaaagatgctcaaaaacctccgtaacaccaactatgatgtctttgagaagatatgctgggggctgggaattgagtacaccttcccccctctgtattaccgaagagcccaccgccgattcgtgaccaagaaggctctgtgcattcgggttttccaggagactcaaaagctgaagaagcgaagaagagccttaaaggctgcagcagcagcccaaaaacaagcaaagcggaggaacccagacagccctgccaaagccataccaaagacactcaaagacagccaataaattctgttcaatcatttctttctgtcttgaagaatgataggagagatgatggggctctttttggcctgaagaggagaaggaatttattctttcattcagctytgagatcccagagktttctgaggcaragtccctgnctyacccaccagaggatacacacttatgacatgcctcccacacattcatacaaacaagtacctgttcatccaggtggtgtgtgttcagtgggnggcaagacagagc

SEQ ID NO: 3112 - protein, 141 aa, Homo sapiens
LPASGCHGPAASSYSASAEPARVRALVYGHHGDPAKVVELKNLELAAVRGSDVRVKMLAAPINPSDINMIQGNYGLLPELPAVGGNEGVAQVVAVGSNVTGLKPGDWVIPANAGLESRSVAQAGAILAHCNLQPPPHRRMA

SEQ ID NO: 3113 - protein, 6 aa, Homo sapiens
MWPAPS

SEQ ID NO: 3114 - protein, 18 aa, Homo sapiens
LGLLVPLEPHHVLGVESP

SEQ ID NO: 3115 - protein, 78 aa, Homo sapiens [sequence omitted]

SEQ ID NO: 3116 - protein, 25 aa, Homo sapiens
HGLLPVCPWACGLRPPRTTPRKKIS

SEQ ID NO: 3117 - protein, 41 aa, Homo sapiens
MCGRRPRLGWTCVWGCTRAPCWGASWARSAGSTTCGRLMSL

SEQ ID NO: 3118 - protein, 139 aa, Homo sapiens
MSCPAHASPPCSNTSGCLEFSFCGFALPIPSPVLHSSWQGGEGWGWFGWVRGFFLCVRCCYLTVLRPYWPFSSSSYLYGTSNKDTHFRPGKKKKKKKKKKKKKKKKKKKKKKKKKKKKKKKKKKKKKKKKKKKKKKKKK

SEQ ID NO: 3119 - protein, 30 aa, Homo sapiens
MLMMGTLVLILLHDVIVTFTEFYNAQNLKW

SEQ ID NO: 3120 - protein, 20 aa, Homo sapiens
FLLSFCAFPCVFMFWVSVLH

SEQ ID NO: 3121 - protein, 21 aa, Homo sapiens
MIYLSIYLLVNILAVSNSWPS

SEQ ID NO: 3122 - protein, 17 aa, Homo sapiens
MPWCLLPLCLHILCVSA

SEQ ID NO: 3123 - protein, 55 aa, Homo sapiens
MVLAIFQNALSFTISALLFILSFYFGTAALWLFICQNCHFLSIQLLCPLFHESPN

SEQ ID NO: 3124 - protein, 11 aa, Homo sapiens
MHQPLCIYCFS

SEQ ID NO: 3125 - protein, 54 aa, Homo sapiens
MTENPKVQMMLIIVVPLQLFINPVQHPIQQVRCIHLHLCHGWALDRLALELVCL

SEQ ID NO: 3126 - protein, 10 aa, Homo sapiens
MTRCLWRTLQ

SEQ ID NO: 3127 - protein, 13 aa, Homo sapiens
MKTTCLSSTLVRM

SEQ ID NO: 3128 - protein, 38 aa, Homo sapiens
VLLILKLLLLKGARSIQIFMFRCLIAFALITKLQNYMD

SEQ ID NO: 3129 - protein, 94 aa, Homo sapiens
MRTIYSAFFFLSLCLSVLLSSTVFDDWHPISISWVQNFGLTPSFDVQVPQTLRCFFRSGCRWHPLNLLQFKLSTFLRIISFYLSFCSEKRLQHE

SEQ ID NO: 3130 - protein, 359 aa, Homo sapiens
MMVIFLVGLVSMILMRTLRKDYARYSKEEEMDDMDRDLGDEYGWKQVHGDVFRPSSHPLIFSSLIGSGCQIFAVSLIVIIVAMIEDLYTERGSMLSTAIFVYAATSPVNGYFGGSLYARQGGRRWIKQMFIGAFLIPAMVCGTAFFINFIAIYYHASRAIPFGTMVAVCCICFFVILPLNLVGTILGRNLSGQPNFPCRVNAVPRPIPEKKWFMEPAVIVCLGGILPFGSIFIEMYFIFTSFWAYKIYYVYGFMMLVLVILCIVTVCVTIVCTYFLLNAEDYRWQWTSFLSAASTAIYVYMYSFYYYFFKTKMYGLFQTSFYFGYMAVFSTALGIMCGAIGYMGTSAFVRKIYTNVKID

SEQ ID NO: 3131 - protein, 38 aa, Homo sapiens
MRTEVGAQRACAVRCVLALGAVVSLLVPPTPALSSIPS

SEQ ID NO: 3132 - protein, 1167 aa, Homo sapiens
  SITE (429): Xaa equals any of the naturally occurring L-amino acids
  SITE (435): Xaa equals any of the naturally occurring L-amino acids
  SITE (437): Xaa equals any of the naturally occurring L-amino acids
  SITE (444): Xaa equals any of the naturally occurring L-amino acids
  SITE (447): Xaa equals any of the naturally occurring L-amino acids
  SITE (452): Xaa equals any of the naturally occurring L-amino acids
  SITE (588): Xaa equals any of the naturally occurring L-amino acids
  SITE (832): Xaa equals any of the naturally occurring L-amino acids
VELPFVTHLFLPLVFLTGLCSPFNLDEHHPRLFPGPPEAEFGYSVLQHVGGGQRWMLVGAPWDGPSGDRRGDVYRCPVGGAHNAPCAKGHLGDYQLGNSSHPAVNMHLGMSLLETDGDGGFMACAPLWSRACGSSVFSSGICARVDASFQPQGSLAPTAQRCPTYMDVVIVLDGSNSIYPWSEVQTFLRRLVGKLFIDPEQIQVGLVQYGESPVHEWSLGDFRTKEEVVRAAKNLSRREGRETKTAQAIMVACTEGFSQSHGGRPEAARLLVVVTDGESHDGEELPAALKACEAGRVTRYGIAVLGHYLRRQRDPSSFLREIRTIASDPDERFFFNVTDEAALTDIVDALGDRIFGLEGSHAENESSFGLEMSQIGFSTHRLKDGILFGMVGAYDWGGSVLWLEGGHRLFPPRMALEDEFPPALQNHAXYLGYSXSXMLLRGGXRLXLSGAXRFRHRGKVIAFQLKKDGAVRVAQSLQGEQIGSYFGSELCPLDTDRDGTTDVLLVAAPMFLGPQNKETGRVYVYLVGQQSLLTLQGTLQPEPPQDARFGFAMGALPDLNQDGFADVAVGAPLEDGHQGALYLYHGTXSGVRPHPAQRIAAASMPHALSYFGRSVDGRLDLDGDDLVDVAVGAQGAAILLSSRPIVHLTPSLEVTPQAISVVQRDCRRRGQEAVCLTAALCFQVTSRTPGRWDHQFYMRFTASLDEWTAGARAAFDGSGQRLSPRRLRLSVGNVTCEQLHFHVLDTSDYLRPVALTVTFALDNTTKPGPVLNEGSPTSIQKLVPFSKDCGPDNECVTDLVLQVNMDIRGSRKAPFVVRGGRRKVLVSTTLEXRKENAYNTSLSLIFSRNLHLASLTPQRESPIKVECAAPSAHARLCSVGHPVFQTGAKVTFLLEFEFSCSSLLSQVFVKLTASSDSLERNGTLQDNTAQTSAYIQYEPHLLFSSESTLHRYEVHPYGTLPVGPGPEFKTTLRVQNLGCYVVSGLIISALLPAVAHGGNYFLSLSQVITNNASCIVQNLTEPPGPPVHPEELQHTNRLNGSNTQCQVVRCHLGQLAKGTEVSVGLLRLVHNEFFRRAKFKSLTVVSTFELGTEEGSVLQLTEASRWSESLLEVVQTRPILISLWILIGSVLGGLLLLALLVFCLWKLGFFAHKKIPEEEKREEKLEQ

SEQ ID NO: 3133 - protein, 23 aa, Homo sapiens
MSVLLLSSSCGAAFAVLCPPHCE

SEQ ID NO: 3134 - protein, 3 aa, Homo sapiens
GYS

SEQ ID NO: 3135 - protein, 68 aa, Homo sapiens [sequence omitted]

SEQ ID NO: 3136 - protein, 42 aa, Homo sapiens
  SITE (38): Xaa equals any of the naturally occurring L-amino acids
MLLFWAIFASYVSIQSMHFRCCGREIFGGAGTSKTGIXLKSQ

SEQ ID NO: 3137 - protein, 37 aa, Homo sapiens
MVGNAFLWLFVHLESVYVQLSSAISWAMGNISVKTNF

SEQ ID NO: 3138 - protein, 17 aa, Homo sapiens
MTCFCQIKYRYHWGFLF

SEQ ID NO: 3139 - protein, 42 aa, Homo sapiens [sequence omitted]

SEQ ID NO: 3140 - protein, 19 aa, Homo sapiens
MYAFLQGFIFLLLFFFIAE

SEQ ID NO: 3141 - protein, 124 aa, Homo sapiens [sequence omitted]

SEQ ID NO: 3142 - protein, 29 aa, Homo sapiens
MKSVLSICSFLGCALSAVSKKSLPNQRLQ

SEQ ID NO: 3143 - protein, 29 aa, Homo sapiens
MKSVLSICSFLGCALSAVSKKSLPNQRLQ

SEQ ID NO: 3144 - protein, 2 aa, Homo sapiens
GA

SEQ ID NO: 3145 - protein, 76 aa, Homo sapiens
LVPLLPGPLVRFCFCLHVGVGSSVGGGAPCPGCRPASCARAPFRVGLDHPSPHQGPHCEVITALNPPLLFYLLNLI

SEQ ID NO: 3146 - protein, 58 aa, Homo sapiens
EFFLFSLSFSLLPSCLSFSPFFSLPFPSPPSLPPSLPSFLPSFLVLFCNPGCSAMAKS

SEQ ID NO: 3147 - protein, 203 aa, Homo sapiens
MGIKTALPAAELGLYSLVLSGALAYAGRGLLEASQDGAHRKAFRESVRPGWEYIGRKMDVADFEWVMWFTSFRNVIIFALSGHVLFAKLCTMVAPKLRSWMYAVYGALAVMGTMGPWYLLLLLGHCVGLYVASLLGQPWLCLGLGLASLASFKMDPLISWQSGFVTGTFDLQEVLFHGGSSFTCCVAPALHWRAVPTLTATTP

SEQ ID NO: 3148 - protein, 136 aa, Homo sapiens
MAGWGLVDVSGAPEPWRIPHGIPLPALSGLCGVRRSPSSRFSFFPPQQRNWRKDIKLSAVDLSAEIFPESMVVLNYLHVSSIFNSGVGLFLISSQKCSALGEGTSPLACHFPGVLYHFDGTLWSAENALSWHASRL

SEQ ID NO: 3149 - protein, 29 aa, Homo sapiens
MFSCFSLVVFILFSLGFFCNAFVQLILSC

SEQ ID NO: 3150 - protein, 42 aa, Homo sapiens
VKVLWLILFILSCSLAGYWQTQSFCFHKELMKRTIGETHVCL

SEQ ID NO: 3151 - protein, 34 aa, Homo sapiens
MISMCQMLRTTVMTHLWIVTWIQRSWQESGDIRV

SEQ ID NO: 3152 - protein, 23 aa, Homo sapiens
MQSWLWAAVCSAGCPCFWGMKAL

SEQ ID NO: 3153 - protein, 31 aa, Homo sapiens
MLSPFTLLLSYATIVHFCMPLIPFLLILTIK

SEQ ID NO: 3154 - protein, 733 aa, Homo sapiens
MQKPTDNAQFTCHYGTTYEIMTVPNDPYTFLSCGEDGTVRWFDTRIKTSCTKEDCKDDILINCRRAATSVAICPPIPYYLAVGCSDSSVRIYDRRMLGTRATGNYAGRGTTGMVARFIPSHLNNKSCRVTSLCYSEDGQEILVSYSSDYIYLFDPKDDTARELKTPSAEERREELRQPPVKRLRLRGDWSDTGPRARPESERERDGEQSPNVSLMQRMSDMLSRWFEEASEVAQSNRGRGRSRPRGGTSQSDISTLPTVPSSPDLEVSETAMEVDTPAEQFLQPSTSSTMSAQAHSTSSPTESPHSTPLLSSPDSEQRQSVEASGHHTHHQSDNNNEKLSPKPGTGEPVLSLHYSTEGTTTSTIKLNFTDEWSSIASSSRGIGSHCKSEGQEESFVPQSSVQPPEGDSETKAPEESSEDVTKYQEGVSAENPVENHINITQSDKFTAKPLDSNSGERNDLNHDRSCGVPEESASSEKAKEPETSDQTSTESATNENNTNPEPQFQTEATGPSAHEETSTRDSALQDTDDSDDDPVLIPGARYRAGPGDRRSAVARIQEFFRRRKERKEMEELDTLNIRRPLVKMVYKGHRNSRTMIKEANFWGANFVMSGSDCGHIFIWDRHTAEHLMLLEADNHVVNCLQPHPFDPILASSGIDYDIKIWSPLEESRIFNRKLADEVITRNELMLEETRNTITVPASFMLRMLASLNHIRADRLEGDRSEGSGQENENEDEE

SEQ ID NO: 3155 - protein, 107 aa, Homo sapiens
MAQQDPGLPFLFWFSVASLITLFHLFLFKLSFGGLQFTENHLQFQADPDVLHNSYALHGIRYKNDHINLAVLADAEGKPYLHVSVESRGQPVKIYACKQAAWTSQWS

SEQ ID NO: 3156 - protein, 8 aa, Homo sapiens
SCFNLLGT

SEQ ID NO: 3157 - protein, 36 aa, Homo sapiens
MNAAVLLTLVFFLLLYLFYLGVLGSDPAYLPLLKKS

SEQ ID NO: 3158 - protein, 8 aa, Homo sapiens
KSILGSHS

SEQ ID NO: 3159 - protein, 77 aa, Homo sapiens
LLITILLGLYFTLLQASEYFESPFTISDGIYGSTFFVATGFHGLHVIIGSTFLTICFIRQLIFHFTSKHHFGFEAAA

SEQ ID NO: 3160 - protein, 31 aa, Homo sapiens
MISMKMILVILVTLALPVAQLHLLLLVLKIQ

SEQ ID NO: 3161 - protein, 4 aa, Homo sapiens
FPYS

SEQ ID NO: 3162 - protein, 28 aa, Homo sapiens
MVFSCHLLFLIRCLYSCGHLSSTLQHII

SEQ ID NO: 3163 - protein, 31 aa, Homo sapiens
MPLVYPVCLLLICFHLSFIEEDPFMILNTFH

SEQ ID NO: 3164 - protein, 89 aa, Homo sapiens
  SITE (34): Xaa equals any of the naturally occurring L-amino acids
MVCTYFLPFCNVFLCLLFLWLCRSFFICCNLIFXSLLFLLVLLESYPKNHCPVQSQETFPYIFFSSFIILGLTCKSLIQFELIFVYGVR

SEQ ID NO: 3165 - protein, 94 aa, Homo sapiens
MDIKNITCSMKITWYILVLLVFIFLIILTIRKILEGQRRVQKWQSHRDKPTSVLLRGSDSEKLRALNVQVLSAETTQRLPLDQVQEVLPPIPEL

SEQ ID NO: 3166 - protein, 28 aa, Homo sapiens
MARNVWFFIVSFCYKFLSYFRASSTLKV

SEQ ID NO: 3167 - protein, 9 aa, Homo sapiens
MPLPSSGQF

SEQ ID NO: 3168 - protein, 49 aa, Homo sapiens
MLAWQHFQIAFCLLGSWGFGGRGSISTLHEIAYFIMMELLFLLSCDFFF

SEQ ID NO: 3169 - protein, 68 aa, Homo sapiens
LASGPGATLRCLVWLWSLSLRALLPLSHAVWWVILCPEPPPWTGPVSRAGTPCLFSLFRHNSRSLASH

SEQ ID NO: 3170 - protein, 11 aa, Homo sapiens
MHLHLPTTLVL

SEQ ID NO: 3171 - protein, 29 aa, Homo sapiens
  SITE (27): Xaa equals any of the naturally occurring L-amino acids
MEGKLTTSKILIVGKVFWVSCTLFYIXFF

SEQ ID NO: 3172 - protein, 48 aa, Homo sapiens
  SITE (2): Xaa equals any of the naturally occurring L-amino acids
MXLQGLPGTSGTGLGCLLCLVLFLSIAVTNKGMEEQSDKKKKKKKKNS

SEQ ID NO: 3173 - protein, 16 aa, Homo sapiens
MALRLARMWLSSLASV

SEQ ID NO: 3174 - protein, 1 aa, Homo sapiens
I

SEQ ID NO: 3175 - protein, 35 aa, Homo sapiens
AHVVVVVLWWEFAAVQTLWPGKSKFLQDGFTASLD

SEQ ID NO: 3176 - protein, 40 aa, Homo sapiens
MLFISNLPLPSQFIYLASDSFFSSPTPFSSTSQPTNTYSL

SEQ ID NO: 3177 - protein, 254 aa, Homo sapiens
  SITE (222): Xaa equals any of the naturally occurring L-amino acids
MQGVILLLFAKYYHLPFLRDVQTDCTRTGLGGYWGNKGGVSVRLAAFGHMLCFLNCHLPAHMDKAEQRKDNFQTILSLQQFQGPGAQGILDHDLVFWFGDLNFRIESYDLHFVKFAIDSDQLHQLWEKDQLNMAKNTWPILKGFQEGPLNFAPTFKFDVGTNKYDTSAKKRKPAWTDRILWKVKAPGGGPSPSGRKSHRLQVTQHSYRSHMEYTVSDHKPVXAQFLLQFAFQGRHATGAAGGGQMSGCGPSRRW

SEQ ID NO: 3178 - protein, 23 aa, Homo sapiens
VQTYVVLLHFALSCFADIVFFTN

SEQ ID NO: 3179 - protein, 32 aa, Homo sapiens
YLLKISLFLGAVYVTLHSSGSCHVFMSEYFWF

SEQ ID NO: 3180 - protein, 32 aa, Homo sapiens
KAIWFLILCTTHSILIITFIYKKNKENNSKLC

SEQ ID NO: 3181 - protein, 55 aa, Homo sapiens
MTNYFWASASSCTVFPLAFLCSSCVGPPSFSCAHHILHQESWHLFFSSAWNAFLC

SEQ ID NO: 3182 - protein, 55 aa, Homo sapiens
MWALKSLFLLTPSPVIRFYFAALWIRAAGRLLGGGGSPTPPTSLAPGFSEAGGLC

SEQ ID NO: 3183 - protein, 23 aa, Homo sapiens
VGHFWVVIWLVRSMSDRMNKNAL

SEQ ID NO: 3184 - protein, 43 aa, Homo sapiens
MGIFDYKLFSHYFKACFIFFLILLTHLCLSLFYYKLFIVQSLP

SEQ ID NO: 3185 - protein, 265 aa, Homo sapiens
MGGQVAGVYAAYYPSDVSSLCLVCPAGLQYSTDNQFVQRLKELQGSAAVEKIPLIPSTPEEMSEMLQLCSYVRFKVPQQILQGLVDVRIPHNNFYRKLFLEIVSEKSRYSLHQNMDKIKVPTQIIWGKQDAGAGCVWGRHVGQVNCQLPGGASGKLWALSSDGKTQEDSQAHNRLFSFCAQHRQQQEAGLRPRLQPAFCTQHLLPSPKSDAATTLRDPAPNAVGAPVTLRKPVPYPWYPRFPRALGTTRKPPRYFSQNRNSYGTK

SEQ ID NO: 3186 - protein, 15 aa, Homo sapiens
MPLPSSPRNCFLKWI

SEQ ID NO: 3187 - protein, 25 aa, Homo sapiens
MALCSLAVFCPSTILGCDLVQLGPE

SEQ ID NO: 3188 - protein, 1 aa, Homo sapiens
I

SEQ ID NO: 3189 - protein, 147 aa, Homo sapiens
VGAALQTLYILAYLHYCPRKRVVLLQTATLLGVLLLGYGYFWLLVPNPEARLQQLGLFCSVFTISMYLSPLADLAKVIQTKSTQCLSYPLTIATLLTSASWCLYGFRLRDPYIMVSNFPGIVTSFIRFWLFWKYPQEQDRNYWLLQT

SEQ ID NO: 3190 - protein, 80 aa, Homo sapiens
NSLVKFTFPPPLSGAPSCVICGFWTPNVSLAVGLPEVWYVLEQWEAVICCVSSHPALESNGHSQPELPLSTPCLGFCSLG

SEQ ID NO: 3191 - protein, 14 aa, Homo sapiens
MPYMYSSPLPIFYT

SEQ ID NO: 3192 - protein, 31 aa, Homo sapiens
MLMLPLLLLILSVELFQLFLSLKLLPLLLLL

SEQ ID NO: 3193 - protein, 47 aa, Homo sapiens
MRFASSDLLCYWKLALFTAIRSSLASIPLMTSFTSLTPLYYCLAQFS

SEQ ID NO: 3194 - protein, 45 aa, Homo sapiens
  SITE (31): Xaa equals any of the naturally occurring L-amino acids
MHVLLFSFLIPFLLLSPVGVTCNSHMLERQXSWLKKRSTQASQHV

SEQ ID NO: 3195 - protein, 1 aa, Homo sapiens
W

SEQ ID NO: 3196 - protein, 38 aa, Homo sapiens
MLLVALPCFLQNCPWSSRVLETLCLLNGPLFLCCALDG

SEQ ID NO: 3197 - protein, 145 aa, Homo sapiens
KSQVFSYPHRYLVLDLALLFLMGILEAVRLYLGTRGNLTEAERPLAASLALTAGTALLSAHFLLWQALVLWADWALSATLLALHGLEAVLQVVAIAAFTRGFGGEVRAKAGDETAGERAAEGHIRSLRPLQFYQLLPFCTELNKF

SEQ ID NO: 3198 - protein, 211 aa, Homo sapiens
MTTLTRQDLNFGQVVADVLCEFLEVAVHLILYVREVYPVGIFQKRKKYNVPVQMSCHPELNQYIQDTLHCVKPLLEKNDVEKVVVVILDKEHRPVEKFVFEITQPPLLSISSDSLLSHVEQLLRAFILKISVCDAVLDHNPPGCTFTVLVHTREAATRNMEKIQVIKDFPWILADEQDVHMHDPRLIPLKTMTSDILKMQLYVEERAHKGS

SEQ ID NO: 3199 - protein, 46 aa, Homo sapiens
MLQTCSVVLHFILCLCVCVFRLIQVVCYISCIIYKVTQNIKSSKLV

SEQ ID NO: 3200 - protein, 122 aa, Homo sapiens [sequence omitted]

SEQ ID NO: 3201 - protein, 29 aa, Homo sapiens
MLCVLVLFILYLPGFSKSNQDVPWGDILC

SEQ ID NO: 3202 - protein, 60 aa, Homo sapiens [sequence omitted]

SEQ ID NO: 3203 - protein, 49 aa, Homo sapiens
  SITE (40): Xaa equals any of the naturally occurring L-amino acids
  SITE (48): Xaa equals any of the naturally occurring L-amino acids
MKGHSSKLFCLVVWGFLCFLFLGCFFFNCLVQKKKEKKNXGGAPEPNXP

SEQ ID NO: 3204 - protein, 5 aa, Homo sapiens
WASLT

SEQ ID NO: 3205 - protein, 22 aa, Homo sapiens
MTCLSCLISFLASLSANWASTR

SEQ ID NO: 3206 - protein, 11 aa, Homo sapiens
MKPSWQLPSCA

SEQ ID NO: 3207 - protein, 26 aa, Homo sapiens
MKYCFRPWVLCDTTLGIGLFGFALCF

SEQ ID NO: 3208 - protein, 12 aa, Homo sapiens
LLVLLQIMKGNL

SEQ ID NO: 3209 - protein, 55 aa, Homo sapiens
MGGDQRSMGLACESPLAAWSLGITPALVLQMLLGFIGAGPSRAGPLTLPAWLHSP

SEQ ID NO: 3210 - protein, 120 aa, Homo sapiens
MMCVVLTTLPCLTFSIAVTEVQKSINGSADVLPDMLPDLPVSLVLLSLIMVDIIEKLRIYPLRGSQKSKCSFKCEYFLKFDIFFTFLPLCYLTTCLMIPFLRANITDRRLQMKISKHNYF

SEQ ID NO: 3211 - protein, 20 aa, Homo sapiens
MGTIKPWKSSAVVGGPGHQG

SEQ ID NO: 3212 - protein, 425 aa, Homo sapiens
  SITE (264): Xaa equals any of the naturally occurring L-amino acids
  SITE (274): Xaa equals any of the naturally occurring L-amino acids
  SITE (278): Xaa equals any of the naturally occurring L-amino acids
  SITE (296): Xaa equals any of the naturally occurring L-amino acids
MELLPLWLCLGFHFLTVGWRNRSGTATAASQGVCKLVGGAADCRGQSLASVPSSLPPHARMLTLDANPLKTLWNHSLQPYPLLESLSLHSCHLERISRGAFQEQGHLRSLVLGDNCLSENYEETAAALHALPGLRRLDLSGNALTEDMAALMLQNLSSLRSVSLAGNTIMRLDDSVFEGLERLRELDLQRNYIFEIEGGAFDGLAELRHLNLAFNNLPCIVDFGLTRLRVLNVSYNVLEWFLATGGEAAFELETLDLSHNQAAXLPAAAPVQQXADPXAARQQHGLLPGPVQHLVXEGDGGPVPPRGRQRDQHHHRQPLGRILLQRPRRSPLPGHEPEPVPVPARRLPEENAFPLPPEPPPELPDDASHSGARAPRSAHRAGPEPQPAVGAAPGSGAGQLPGQPALVQPELQPAPGRPPWPLRQC

SEQ ID NO: 3213 - protein, 52 aa, Homo sapiens
MRLSVRRVLLATGCALVLVLAVQLGQQVLECRAVLAGLRTPGGPCGLSRRSW

SEQ ID NO: 3214 - protein, 7 aa, Homo sapiens
MQVFEFF

SEQ ID NO: 3215 - protein, 73 aa, Homo sapiens [sequence omitted]

SEQ ID NO: 3216 - protein, 23 aa, Homo sapiens
MAFLPSPAWWISLLPSLLSIARS

SEQ ID NO: 3217 - protein, 133 aa, Homo sapiens
MISDAGAGFGVFLLVPRAGHCWGAGKPSLPVLLWPPSPHGCCHPSWREGGESWCEPSGFPPTHPGAGWARTGRGSTAALLALLLPQLGVDRASLSPLFWREGEGGGLQAGARLGVLGGEMRFRGCLMGWAGLG

SEQ ID NO: 3218 - protein, 62 aa, Homo sapiens
MEQEPVRRYPLVPLVPLVVVAVWGFFPGGSESSSSELDSISLRSSLDTLPLETALQAIFTIK

SEQ ID NO: 3219 - protein, 16 aa, Homo sapiens
LFVFFCFVLVFFFFLA

SEQ ID NO: 3220 - protein, 12 aa, Homo sapiens
MLLLSIVLLLIL

SEQ ID NO: 3221 - protein, 38 aa, Homo sapiens
MAHSRYSTIIILYLIANWLAFAQHSAYIGPLRGLSPAS

SEQ ID NO: 3222 - protein, 29 aa, Homo sapiens
MLMASALSRCAGAAVLVLLLWLAVDWALM

SEQ ID NO: 3223 - protein, 41 aa, Homo sapiens
MKLFFCLCAGLILEFQKALWERKRLLNKVWNRAPHSDNMQS

SEQ ID NO: 3224 - protein, 48 aa, Homo sapiens
  SITE (9): Xaa equals any of the naturally occurring L-amino acids
  SITE (10): Xaa equals any of the naturally occurring L-amino acids
MATQQCIYXXLCWLFIYSLYRRKLNMDHTFSPEFSFSLQVPQNYCVLN

SEQ ID NO: 3225 - protein, 17 aa, Homo sapiens
MSSLLLIIILALSLAYE

SEQ ID NO: 3226 - protein, 33 aa, Homo sapiens
MWMAKPTCYLALTGWSCWRTCWERSGWALYLQP

SEQ ID NO: 3227 - protein, 20 aa, Homo sapiens
MAAMVFLLLSITTIWGAFKK

SEQ ID NO: 3228 - protein, 29 aa, Homo sapiens
APLCHCPYFGFCKHPLRLVSSLGKQASTS

SEQ ID NO: 3229 - protein, 60 aa, Homo sapiens
MGFHLLLGLVNLLGLVNCFLLGKPNYLSLIVSIVAPLTFLFSFISNIKKKKKKGGRSRGS

SEQ ID NO: 3230 - protein, 7 aa, Homo sapiens
MFECYCL

SEQ ID NO: 3231 - protein, 7 aa, Homo sapiens
MFECYCL

SEQ ID NO: 3232 - protein, 52 aa, Homo sapiens
  SITE (18): Xaa equals any of the naturally occurring L-amino acids
MSLTTLWTLDKLLLCVCXLICKMKIISVSYRYSLNRDNYTYFKVVKYTITTR

SEQ ID NO: 3233 - protein, 13 aa, Homo sapiens
CTHPASGPLSSTS

SEQ ID NO: 3234 - protein, 39 aa, Homo sapiens
MVMFLSLSLWINPVIGKDMTIWRWNTYRKDQISYLLFFH

SEQ ID NO: 3235 - protein, 42 aa, Homo sapiens
MLLCPNLRNPLIWGLILLTHAISVSVASFYYIILVKSKLYHV

SEQ ID NO: 3236 - protein, 41 aa, Homo sapiens
MPFPWSFRLLMLLSTAQSPQPQKRFPLHSTPLQSNFPLSKC

SEQ ID NO: 3237 - protein, 62 aa, Homo sapiens
EAFCFLRSYFCYSCNAPPYMPHLCESTGIRFGHHTCLKLGSVCSVFCVEWRKKRLPCCLPCS

SEQ ID NO: 3238 - protein, 25 aa, Homo sapiens
  SITE (24): Xaa equals any of the naturally occurring L-amino acids
MSPSLLLTCIIGRLIIPPSLKSPXS

SEQ ID NO: 3239 - protein, 46 aa, Homo sapiens
MALLWQINWTIAEAFLRGDITDSTALWSWAATSRTSLWSTVTSPAL

SEQ ID NO: 3240 - protein, 226 aa, Homo sapiens
  SITE (10): Xaa equals any of the naturally occurring L-amino acids
  SITE (31): Xaa equals any of the naturally occurring L-amino acids
  SITE (32): Xaa equals any of the naturally occurring L-amino acids
  SITE (37): Xaa equals any of the naturally occurring L-amino acids
  SITE (129): Xaa equals any of the naturally occurring L-amino acids
  SITE (130): Xaa equals any of the naturally occurring L-amino acids
  SITE (150): Xaa equals any of the naturally occurring L-amino acids
  SITE (214): Xaa equals any of the naturally occurring L-amino acids
MRGLLCWPVXLLLLQPWETQLQLTGPRCHTXXLDLVXVIDSSRSVRPFEFETMRQFLMGLLRGLNVGPNATRVGVIQYSSQVQSVFPLRAFSRREDMERAIRDLVPLAQGTMTGLAIQYAMNVAFSVAXXARPPEERVPRVAVIVTDGRXQDRVAEVAAQARARGIEIYAVGVQRADVGSLRAMASPPLDEHVFLVESFDLIQEFGLQFQSRLXGPGPLQWRGPWL

SEQ ID NO: 3241 - protein, 33 aa, Homo sapiens
MRAGIVCILYIFICSVFAQCLVHSRVSMYECVG

SEQ ID NO: 3242 - protein, 47 aa, Homo sapiens
MIFPKICPISPNLVSVLSLVFFWTLLGSRRVCYQFSRLGEVRSGEQL

SEQ ID NO: 3243 - protein, 47 aa, Homo sapiens; identical to SEQ ID NO: 3242

SEQ ID NO: 3244 - protein, 43 aa, Homo sapiens
MFTIRSRMCLHFLVLVICILRECESVCVCVCVCVCLWHLGRVV

SEQ ID NO: 3245 - protein, 43 aa, Homo sapiens; identical to SEQ ID NO: 3244

SEQ ID NO: 3246 - protein, 471 aa, Homo sapiens
  SITE (37): Xaa equals any of the naturally occurring L-amino acids
  SITE (41): Xaa equals any of the naturally occurring L-amino acids
  SITE (43): Xaa equals any of the naturally occurring L-amino acids
  SITE (48): Xaa equals any of the naturally occurring L-amino acids
  SITE (191): Xaa equals any of the naturally occurring L-amino acids
  SITE (373): Xaa equals any of the naturally occurring L-amino acids
  SITE (446): Xaa equals any of the naturally occurring L-amino acids
STPSGYLELPDLGQPYSSAVYSLEEQYLGLALDVDRXKKDXEXEEDQXPPCPRLSRELLEVVEPEVLQDSLDRCYSTPSSCLEQPDSCQPYGSSFYALEEKHVGFSLDVGEIEKKGKGKKRRGRRSKKERRRGRKEGEEDQNPPCPRLSRELLDEKGPEVLQDSLDRCYSTPSGCLELTDSCQPYRSAFYXLEQQRVGLAVDMDEIEKYQEVEEDQDPSCPRLSRELLDEKEPEVLQDSLDRCYSTPSGYLELPDLGQPYSSAVYSLEEQYLGLALDVDRIKKDQEEEEDQGPPCPRLSRELLEVVEPEVLQDSLDRCYSTPSSCLEQPDSCQPYGSSFYALEEKHVGFSLDVGEIEKKGKGKKRRGRRSKKXRRRGRKEGEEDQNPPCPRLNGVLMEVEEPEVLQDSLDRCYSTPSMYFELPDSFQHYRSVFYSFEEQHISFALXVDNRFFTLTVTSLHLVFQMGVIFPQ

SEQ ID NO: 3247 - protein, 43 aa, Homo sapiens; identical to SEQ ID NO: 3244

SEQ ID NO: 3248 - protein, 43 aa, Homo sapiens; identical to SEQ ID NO: 3244

SEQ ID NO: 3249 - protein, 24 aa, Homo sapiens
MLFFPLVLLPCVFLSYSKRRRAQG

SEQ ID NO: 3250 - protein, 187 aa, Homo sapiens [sequence omitted]

SEQ ID NO: 3251 - protein, 235 aa, Homo sapiens
  SITE (204): Xaa equals any of the naturally occurring L-amino acids
MGLPGLFCLAVLAASSFSKAREEEITPVVSIAYKVLEVFPKGRWVLITCCAPQPPPPITYSLCGTKNIKVAKKVVKTHEPASFNLNVTLKSSPDLLTYFCRASSTSGAHVDSARLQMHWELWSRQRGRPQGGDDLPGVLGQPTYHQQPDREGWAGPPAAETMPQAACQLLLPAEPDIGLVLVPGCKQRQCPAQRPHSGAPRRVXQGTHHRAGWQPCLHCGHHLQDAGLDPRGPRW

SEQ ID NO: 3252 - protein, 78 aa, Homo sapiens
DLGTLRTARRWLRGVQGPFPPGSSCLHPALSCGPSSHSEALQNMSPVGTSSFPVPGPQLVSAAASLGPFPKPRVTAGA

SEQ ID NO: 3253 - protein, 9 aa, Homo sapiens
MASGSKISS

SEQ ID NO: 3254 - protein, 69 aa, Homo sapiens
MVPTPPGWVGFFVFWVFLGGGLFHVTSISVFISYLFHFQVYHGKCTDFFVNNVLGFAKKEKKKTLLSLP

SEQ ID NO: 3255 - protein, 118 aa, Homo sapiens
MPFTFSWCFSLWTLLNHRPDKSLQRKGLWAVPEAGWGQDNTAASPGCPLWGPLGAGKGIGQRGSGAGHEGPPSALWLQGWRWFCPPSLPSGGAGGSAAGVGTSPRMAVEGVRTVLGSP

SEQ ID NO: 3256 - protein, 36 aa, Homo sapiens
MFLLTIGKIEKALCFLFFCCCCHCCFFQKTSVSVLS

SEQ ID NO: 3257 - protein, 41 aa, Homo sapiens
DFLFFFPPCGSHCFLSCLYLSLCLSSSFPQMSQLSLPNFPI

SEQ ID NO: 3258 - protein, 29 aa, Homo sapiens
MRQQQTHLAAGVLFCCRLTFSSSVSGKSG

SEQ ID NO: 3259 - protein, 42 aa, Homo sapiens
MMNVSLEIYFVVFLSLFCVVLPLHALFLKSFFFLDFACFQIL

SEQ ID NO: 3260 - protein, 34 aa, Homo sapiens
MQCNFLSSLERWGHIPLGCFLLCVILISLAGKQK

SEQ ID NO: 3261 - protein, 20 aa, Homo sapiens
MTTFLLLLLLVSIFSSVNCG

SEQ ID NO: 3262 - protein, 17 aa, Homo sapiens
MRIASFCWEDRIFHSKF

SEQ ID NO: 3263 - protein, 22 aa, Homo sapiens
MVIFIILLTCFGFSNGSFSFSL

SEQ ID NO: 3264 - protein, 22 aa, Homo sapiens
MVIFIILLTCFGFSNGSFSFSL

SEQ ID NO: 3265 - protein, 10 aa, Homo sapiens
MVVVTLMLFL

SEQ ID NO: 3266 - protein, 51 aa, Homo sapiens
LEAPSMKTDTRTIFVAIFSCISILLLFLSVFIIYRCSQHGELRERKGREGE

SEQ ID NO: 3267 - protein, 15 aa, Homo sapiens
LPCLAGCRVKFMIMK

SEQ ID NO: 3268 - protein, 32 aa, Homo sapiens
MEKGAAKKNFWVQGTVYLLLLFMPVAGCPTTL

SEQ ID NO: 3269 - protein, 50 aa, Homo sapiens
MSLSVAWWLSVCSAAGEGPTPGQCSAFRRPTGNQKFPNIMAPSPLQSSFP

SEQ ID NO: 3270 - protein, 40 aa, Homo sapiens
MKNPITKRWKHLTGTLILVNSLDVLRAAAFSPADQDDFVI

SEQ ID NO: 3271 - protein, 22 aa, Homo sapiens
MVPSLNLYLLVSWDTLLENFLM

SEQ ID NO: 3272 - protein, 66 aa, Homo sapiens
FYLLVLVFLNSIFAELSLFLPCLSPVCLSFVVDIVLSSPKYLSLETYSKRILFSMSVFLLCCPPCL

SEQ ID NO: 3273 - protein, 2 aa, Homo sapiens
DI

SEQ ID NO: 3274 - protein, 42 aa, Homo sapiens
FLPTLLIIISLFQFGLFFSFNESNRIHGSFYFNVFILSGQCI

SEQ ID NO: 3275 - protein, 15 aa, Homo sapiens
MFEDNKWWCILFLIR

SEQ ID NO: 3276 - protein, 18 aa, Homo sapiens
MKTVSPKCLRITLSTSCP

SEQ ID NO: 3277 - protein, 40 aa, Homo sapiens
MRCARHWKWLLLCFWGQLICRRLWRRSGRGKCFLCCLHRE

SEQ ID NO: 3278 - protein, 31 aa, Homo sapiens
MASVFLLLYLELFCQPFPSTLGACKSRGALF

SEQ ID NO: 3279 - protein, 51 aa, Homo sapiens
MAFQSLLEMKFFLCAAFPLGAGVKMFHYLGPGKPLPQASPSPHPHRNRIWP

SEQ ID NO: 3280 - protein, 82 aa, Homo sapiens [sequence omitted]

SEQ ID NO: 3281 - protein, 43 aa, Homo sapiens
MEIYVSLGIVGLAILALLAVTSIPSVSDSLTWREFHYIQVNNI

SEQ ID NO: 3282 - protein, 42 aa, Homo sapiens
MLLVSCCLAGHICVWDAQTGDCLTRIPRPGRQRRGQWRGQRA

SEQ ID NO: 3283 - protein, 55 aa, Homo sapiens
MSMSCPWLGTWAVVCASPRQRNDSQGTDARGGNRADQRLPGHKRNLEERTPAEQT

SEQ ID NO: 3284 - protein, 44 aa, Homo sapiens
MWVLLSLFCIFVLLLILFAFIAKTHIRLTMSQALFSVLHRYEFI

SEQ ID NO: 3285 - protein, 35 aa, Homo sapiens
  SITE (5): Xaa equals any of the naturally occurring L-amino acids
  SITE (6): Xaa equals any of the naturally occurring L-amino acids
  SITE (7): Xaa equals any of the naturally occurring L-amino acids
MFLLXXXSSLCPFSPSFSLSSLPFYLWCYHVLEQQ

SEQ ID NO: 3286 - protein, 25 aa, Homo sapiens
MCRYLPLMLFMTMCRFLLGLFAVGW

SEQ ID NO: 3287 - protein, 45 aa, Homo sapiens
MMVTRLPCWAGVLPPVPLLLACMTSTARPWAQAPCPFSTAPLSRQ

SEQ ID NO: 3288 - protein, 30 aa, Homo sapiens
MAVGSCSPILSLLGPGILAPLSALPLISVP

SEQ ID NO: 3289 - protein, 10 aa, Homo sapiens
MWQVAPVHLL

SEQ ID NO: 3290 - protein, 5 aa, Homo sapiens
NNRYV

SEQ ID NO: 3291 - protein, 39 aa, Homo sapiens
MEAVYHYFLLLLLEIFSEYLILHFLLSFAIEFFIPMITS

SEQ ID NO: 3292 - protein, 36 aa, Homo sapiens
ERCVFWLFRPPAFPSLSLLPAPASLFRDTKISKLVQ

SEQ ID NO: 3293 - protein, 65 aa, Homo sapiens
MLHTMRNVRGCVCVCVCVCVCVSEGHLLNGTPKNTIVFVFAVVRGLNKCKLAQEMLDLRGLERPD

SEQ ID NO: 3294 - protein, 26 aa, Homo sapiens
MFFLLLLMLLPHCLNYYILLTNLTFW

SEQ ID NO: 3295 - protein, 6 aa, Homo sapiens
MLLPLL

SEQ ID NO: 3296 - protein, 19 aa, Homo sapiens
MLPPLLEWAVFVPLSQLLL

SEQ ID NO: 3297 - protein, 39 aa, Homo sapiens
MFFLIKVPLNWPLYQPLVLAKCPKHALGPRHVTIHRLSV

SEQ ID NO: 3298 - protein, 48 aa, Homo sapiens
INSWKRPVNASCFCICVLRWALWFLCTQSTFLVITIVIFIVMTAPELW

SEQ ID NO: 3299 - protein, 52 aa, Homo sapiens
TFGLFLLFLAIVNSAVMNTDVQFFGVNICFYSFGYIPRCGIAGSYMVILSLT

SEQ ID NO: 3300 - protein, 9 aa, Homo sapiens
ALWLLLQLS

SEQ ID NO: 3301 - protein, 9 aa, Homo sapiens
ALWLLLQLS

SEQ ID NO: 3302 - protein, 9 aa, Homo sapiens
ALWLLLQLS

SEQ ID NO: 3303 - protein, 3 aa, Homo sapiens
GRW

SEQ ID NO: 3304 - protein, 36 aa, Homo sapiens
MVLALAVFTLLASVCCQLHSHSFYPCMSCFYSSLSF

SEQ ID NO: 3305 - protein, 64 aa, Homo sapiens
MWLLWQPYLAGFLLQVLEGRVAQSQAEADSGVLGAGGTTPAGGRRGLCQQSEQPRGPIPHILQV

SEQ ID NO: 3306 - protein, 41 aa, Homo sapiens
MLSGSSRGSQGSLNLHVCLWLPPQPPLHPSYSFSFFLQFWE

SEQ ID NO: 3307 - protein, 223 aa, Homo sapiens
MWGLVSALAATLCFSLQNIFSKKVLRDSRIHHLRLLNILGCHAVFFMIPTWVLVDLSAFLVSSDLTYVYQWPWTLLLLAVSGFCNFAQNVIAFSILNLVSPLSYSVANATKRIMVITVSLIMLRNPVTSTNVLGMMTAILGVFLYNKTKYDANQQARKHLLPVTTADLSSKERHRSPLEKPHNGLLFPQHGDYQYGRNNILTDHFQYSRQSYPNSYSLNRYDV

SEQ ID NO: 3308 - protein, 47 aa, Homo sapiens
MTLTAWTGACWPSFTWLMPRTSWRMLLLLFWTSSMIWLPRECGSFST

SEQ ID NO: 3309 - protein, 24 aa, Homo sapiens
MGELLWLVILCAHIIVATHHCWEN

SEQ ID NO: 3310 - protein, 8 aa, Homo sapiens
MFQRLLKY

SEQ ID NO: 3311 - protein, 27 aa, Homo sapiens
GVSVIISLLISSSEDCYQSLGLEVQII

SEQ ID NO: 3312 - protein, 38 aa, Homo sapiens
MRVVLPSWLGSSGCWDILSLLCFNIFTALFLNGPVTRD

SEQ ID NO: 3313 - protein, 5 aa, Homo sapiens
FCELA

SEQ ID NO: 3314 - protein, 55 aa, Homo sapiens
MSACLPGSLFLLFPPAGRYQRRGHPSRPGMGRKEVTAKAVEWGWHQPLVCFPCGS

SEQ ID NO: 3315 - protein, 24 aa, Homo sapiens
MSIWLMHFCLLVLGKRMSILDVKL

SEQ ID NO: 3316 - protein, 32 aa, Homo sapiens
APRFPSLLVLLPGILFPGLSGHCFVSGFFTLL

SEQ ID NO: 3317 - protein, 6 aa, Homo sapiens
MYFWCC

SEQ ID NO: 3318 - protein, 327 aa, Homo sapiens
MLATSQALDTVWRMAKGFVMLAVSFLVAAICYFRRLHLYSGHKLKWWIGYLQRKFKRNLSVEAEVDLLSYCAREWKGETPRNKLMRKAYEELFWRHHIKCVRQVRRDNYDALRSVLFQIFSQGISFPSWMKEKDIVKLPEKLLFSQGCNWIQQYSFGPEKYTGSNVFGKLRKYVELLKTQWTEFNGIRDYHKRGSMCNTLFSDAILEYKLYEALKFIMLYQVTEVYEQMKTKKVIPSLFRLLFSRETSSDPLSFMMNHLNSVGDTCGLEQIDMFILGYSLEVKIKVFRLFKFNSRDFEVCYPEEPLRDWPEISLLTENDRHYHIPVF

SEQ ID NO: 3319 - protein, 327 aa, Homo sapiens; identical to SEQ ID NO: 3318

SEQ ID NO: 3320 - protein, 56 aa, Homo sapiens
MWPFYLRRVVVQSSLGPMKLPCSLWLWTVVASCICCPHGGVFLCGSCSCCVSGLLL

SEQ ID NO: 3321 - protein, 5 aa, Homo sapiens
MGHTP

SEQ ID NO: 3322 - protein, 9 aa, Homo sapiens
LKILFLIEV

SEQ ID NO: 3323 - protein, 27 aa, Homo sapiens
MTSSVACPGARVCLAGSWPAASSSPCW

SEQ ID NO: 3324 - protein, 34 aa, Homo sapiens
FGYFWYRWPLGWIFLHSVPQLQEGVPLVCEYVCL

SEQ ID NO: 3325 - protein, 18 aa, Homo sapiens
LATLLLRLLLSLGTGCQR

SEQ ID NO: 3326 - protein, 43 aa, Homo sapiens
  SITE (28): Xaa equals any of the naturally occurring L-amino acids
  SITE (33): Xaa equals any of the naturally occurring L-amino acids
DQFSTAVRHRVPAGHWQVAGSTPTPCPXNPDLXPGKEREGPVS

SEQ ID NO: 3327 - protein, 117 aa, Homo sapiens
CVETPRPGFCQKAPWYQPGKSATKPTTTREETIPSKFTSPNTNLPKLNRLQPLCPDPTLTAFPFTQIWAFWQKVLRLWGKRRAVMALRWVSYSPEEIGLFYALPYIRNYIQDAILRH

SEQ ID NO: 3328 - protein, 281 aa, Homo sapiens
MAEALLLRATFYLLIGNANAAKPDLDKVISLKEANVKLRANALIKRGSMYMQQQQPLLSTQDFNMAADIDPQNADVYHHRGQLKILLDQVEEAVADFDECIRLRPESALAQAQKCFALYRQAYTGNNSSQIQAAMKGFEEVIKKFPRCAEGYALYAQALTDQQQFGKADEMYDKCIDLEPDNATTYVHKGLLQLQWKQDLDRGLELISKAIEIDNKCDFAYETMGTIEVQRGNMEKAIDMFNKAINLAKSEMEMAHLYSLCDAAHAQTEVAKKYGLKPPTL

SEQ ID NO: 3329 - protein, 50 aa, Homo sapiens
MHLCLLWQLHYVVGDVDAEPHILSSCLCYSPLCFTFSNECQAGDFQIQKF

SEQ ID NO: 3330 - protein, 50 aa, Homo sapiens
MVYIYYLYFLTFYYLLNPLHQTTTYGTSQGSSLGALFFKYSVLMKNKFNI

SEQ ID NO: 3331 - protein, 36 aa, Homo sapiens
  SITE (35): Xaa equals any of the naturally occurring L-amino acids
MFDSTPVLVALFLHPRLGASYSLCLQHSSSPCLPXS

SEQ ID NO: 3332 - protein, 36 aa, Homo sapiens
MELWLPRYLKGLSCLLLFDLFNLIWAIKYHFSGLFF

SEQ ID NO: 3333 - protein, 11 aa, Homo sapiens
MSHSLSVACVY

SEQ ID NO: 3334 - protein, 4 aa, Homo sapiens
LDFC

SEQ ID NO: 3335 - protein, 10 aa, Homo sapiens
MCGAFQDSPQ

SEQ ID NO: 3336 - protein, 41 aa, Homo sapiens
MYNHLSLNCTLPLFICALFLVYSVIIPHLKNKNHYCYILLI

SEQ ID NO: 3337 - protein, 46 aa, Homo sapiens
MMAIPYFILAELNFIFLCILLPDDLGGKSRLVKANHGSSILMILLG

SEQ ID NO: 3338 - protein, 348 aa, Homo sapiens
MNMTQARVLVAAVVGLVAVLLYASIHKIEEGHLAVYYRGGALLTSPSGPGYHIMLPFITTFRSVQTTLQTDEVKNVPCGTSGGVMIYIDRIEVVNMLAPYAVFDIVRNYTADYDKTLIFNKIHHELNQFCSAHTLQEVYIELFDQIDENLKQALQKDLNLMAPGLTIQAVRVTKPKIPEAIRRNFELMEAEKTKLLIAAQKQKVVEKEAETERKKAVIEAEKIAQVAKIRFQQKVMEKETEKRISEIEDAAFLAREKAKADAEYYAAHKYATSNKHKLTPEYLELKKYQAIASNSKIYFGSNIPNMFVDSSCALKYSDIRTGRESSLPSKEALEPSGENVIQNKESTG

SEQ ID NO: 3339 - protein, 66 aa, Homo sapiens
  SITE (40): Xaa equals any of the naturally occurring L-amino acids
MCLLSLAYFILVLGYGASYGKGKGPFRKTSFGEIKMWTVXKKKKKKKKKKKKKKKKKKKKKKKKKK

SEQ ID NO: 3340 - protein, 14 aa, Homo sapiens
MLSQPPHSKRGYRL

SEQ ID NO: 3341 - protein, 34 aa, Homo sapiens
MFLSFLNILIILLQGIWEPYLVFACNVIRYNYTM

SEQ ID NO: 3342 - protein, 127 aa, Homo sapiens
MVFCLAFGATLLLAGKIQFGYVYGISAIGCLGMFCLLNLMSMTGVSFGCVASVLGYCLLPMILLSSFAVIFSLQGMVGIILTAGIIGWCSFSASKIFISALAMEGQQLLVAYPCALLYGVFALISVF

SEQ ID NO: 3343 - protein, 2 aa, Homo sapiens
PC

SEQ ID NO: 3344 - protein, 72 aa, Homo sapiens [sequence omitted]

SEQ ID NO: 3345 - protein, 17 aa, Homo sapiens
MCTSVLLAIFLLCFSVT

SEQ ID NO: 3346 - protein, 21 aa, Homo sapiens
MRAGCRLCSLWLWTHNSWARG

SEQ ID NO: 3347 - protein, 10 aa, Homo sapiens
MLALSTHFLP

SEQ ID NO: 3348 - protein, 49 aa, Homo sapiens
MWAGASRGRTGARLAVPLHAWCTLWPLALGQAILLQIPVLPQGHHQAPP

SEQ ID NO: 3349 - protein, 28 aa, Homo sapiens [sequence omitted]

SEQ ID NO: 3350 - protein, 12 aa, Homo sapiens
MVCLLVHSFLSF

SEQ ID NO: 3351 - protein, 182 aa, Homo sapiens
  SITE (1): Xaa equals any of the naturally occurring L-amino acids
  SITE (5): Xaa equals any of the naturally occurring L-amino acids
  SITE (11): Xaa equals any of the naturally occurring L-amino acids
XLLPXTPLGIXYDGLMSFAGGKLLIVGENATAHIFATYPAPYLSLANAFADQVVATMILLIIVFAIFDSRNLGAPRGLEPIAIGLLIIVIASSLGLNSGCAMNPARDLSPRLFTALAGWGFEVFRAGNNFWWIPVVGPLVGAVIGGLIYVLVIEIHHPEPDSVFKAEQSEDKPEKYELSVIM

SEQ ID NO: 3352 - protein, 52 aa, Homo sapiens
MKWVLTCTTLEVVCLACDKHAADVMLAFIIIGYLPYPRMSSCPLSPLIIDRS

SEQ ID NO: 3353 - protein, 30 aa, Homo sapiens
MAKFTSWFLVFFVLVAHSLHILPHPVCLGS

SEQ ID NO: 3354 - protein, 57 aa, Homo sapiens
MNSQVLYFTVLVCLMEISRWSHKNILCSVPSKRTIYFSSLIVPQSHIWWWSAKSHLV

SEQ ID NO: 3355 - protein, 57 aa, Homo sapiens; identical to SEQ ID NO: 3354

SEQ ID NO: 3356 - protein, 32 aa, Homo sapiens
MFHVCCAFLNFMLHSKTVVLFLWCLDSCGVCF

SEQ ID NO: 3357 - protein, 50 aa, Homo sapiens
MYPLDVDNNVPFLSLFLLLLLKLIVLPNLLLCFFPNTVIYLICRQEPCLC

SEQ ID NO: 3358 - protein, 43 aa, Homo sapiens
MKAISVSLLRLTKLLWFFSIVLYVPLLAVLLFNTVLYFFSKCT

SEQ ID NO: 3359 - protein, 35 aa, Homo sapiens
MAFLILHGVQMTTILLLVAQMTALSFGFGMYKQEN

SEQ ID NO: 3360 - protein, 23 aa, Homo sapiens
YVCVYVVCCYLHGKIWHHQQKIY

SEQ ID NO: 3361 - protein, 43 aa, Homo sapiens
  SITE (14): Xaa equals any of the naturally occurring L-amino acids
MCNQVFLLLILILXDDHFYTLWQSLIASVSCLENEFIIYLLGN

SEQ ID NO: 3362 - protein, 14 aa, Homo sapiens
MRKLAFGLRISYCS

SEQ ID NO: 3363 - protein, 73 aa, Homo sapiens [sequence omitted]

SEQ ID NO: 3364 - protein, 42 aa, Homo sapiens
MSKFVSLPVFLACISPWFNSYQIFGRGGTEVSSHSRALGCPY

SEQ ID NO: 3365 - protein, 450 aa, Homo sapiens
MVPLVAVVSGPRAQLFACLLRLGTQQVGPLQLHTGASHAARNHYEVLVLGGGSGGITMAARMKRKVGAENVAIVEPSERHFYQPIWTLVGAGAKQLSSSGRPTASVIPSGVEWIKARVTELNPDKNCIHTDDDEKISYRYLIIALGIQLDYEKIKGLPEGFAHPKIGSNYSVKTVEKTWKALQDFKEGNAIFTFPNTPVKCAGAPQKIMYLSEAYFRKTGKRSKANIIFNTSLGAIFGVKKYADALQEIIQERNLTVNYKKNLIEVRADKQEAVFENLDKPGETQVISYEMLHVTPPMSPPDVLKTSPVADAAGWVDVDKETLQHRRYPNVFGIGDCTNLPTSKTAAAVAAQSGILDRTISVIMKNQTPTKKYDGYTSCPLVTGYNRVILAEFDYKAEPLETFPFDQSKERLSMYLMKADLMPFLYWNMMLRGYWGGPAFLRKLFHLGMS

SEQ ID NO: 3366 - protein, 35 aa, Homo sapiens
MTTRRSPTDILLLLSESSWTMRRLKAYLKVSLIPK

SEQ ID NO: 3367 - protein, 450 aa, Homo sapiens; identical to SEQ ID NO: 3365

SEQ ID NO: 3368 - protein, 35 aa, Homo sapiens; identical to SEQ ID NO: 3366

SEQ ID NO: 3369 - protein, 35 aa, Homo sapiens; identical to SEQ ID NO: 3366

SEQ ID NO: 3370 - protein, 48 aa, Homo sapiens
MCPPHLMLICLMVMPRVQDLVTCAVVNTQRLGRSVSLVLPSFKVHGKI

SEQ ID NO: 3371 - protein, 26 aa, Homo sapiens
MVFFSAILFLYILYLFADYSSIFDFP

SEQ ID NO: 3372 - protein, 8 aa, Homo sapiens
MAKFTVLW

SEQ ID NO: 3373 - protein, 34 aa, Homo sapiens
MVHLLLVFWSGPHNLGRFQPMKLFAICLNQSMLL

SEQ ID NO: 3374 - protein, 33 aa, Homo sapiens
MLHGVVIVRLWLLLGRNSLKRNSLVWRGSRSPK

SEQ ID NO: 3375 - protein, 17 aa, Homo sapiens
LWVWLRSCWKNSTCPAW

SEQ ID NO: 3376 - protein, 93 aa, Homo sapiens
MWIRVGFLVFKTPGLRTPAAGERIYNISGNGSPLADSKEIFLTVPVGGGESLRLLASDLQRHSIAQLDPEALGNIKKLSNRLAQICSSIRTHK

SEQ ID NO: 3377 - protein, 31 aa, Homo sapiens
MYNLSSLFMISFLVCHVTPSQTLKGPPLSWS

SEQ ID NO: 3378 - protein, 6 aa, Homo sapiens
MFLREQ

SEQ ID NO: 3379 - protein, 32 aa, Homo sapiens
TSCCIIIFLCAEQLKTQPQYANCFNAILRQLI

SEQ ID NO: 3380 - protein, 30 aa, Homo sapiens
MKTWLPKRSLLLCTPTTCRPAASPTLTCRS

SEQ ID NO: 3381 - protein, 10 aa, Homo sapiens
MLLYLTVGYW

SEQ ID NO: 3382 - protein, 27 aa, Homo sapiens
MTVPTLAMKKNQDAASWSLTCVSCLHY

SEQ ID NO: 3383 - protein, 35 aa, Homo sapiens
MKFKSQCLEIKFYSHTACSFVYLLCMATFTLQWQS

SEQ ID NO: 3384 - protein, 381 aa, Homo sapiens
MSRHEGVSCDACLKGNFRGRRYKCLICYDYDLCASCYESGATTTRHTTDHPMQCILTRVDFDLYYGGEAFSVEQPQSFTCPYCGKMGYTETSLQEHVTSEHAETSTEVICPICAALPGGDPNHVTDDFAAHLTLEHRAPRDLDESSGVRHVRRMFHPGRGLGGPRARRSNMHFTSSSTGGLSSSQSSYSPSNREAMDPIAELLSQLSGVRRSAGGQLNSSGPSASQLQQLQMQLQLERQHAQAARQQLETARNATRRTNTSSVTTTITQSTATTNIANTESSQQTLQNSQFLLTRLNDPKMSETERQSMESERADRSLFVQELLLSTLVREESSSSDEDDRGEMADFGAMGCVDIMPLDVALENLNLKESNKGNEPPPPPL

SEQ ID NO: 3385 - protein, 93 aa, Homo sapiens [sequence omitted]

SEQ ID NO: 3386 - protein, 113 aa, Homo sapiens
MSPSPRWGFLCVLFTAVHPAPSTAPVQDKCPVNTWEAMQASSQQLLQTDPRPKPFLLPPLPPLLLISAGTEVSSLVFQKSPLHTQPEGAIKTAGQPTSVHSKVLSKGSLLLGE

SEQ ID NO: 3387 - protein, 35 aa, Homo sapiens
HKKSFQGRALGDPLFKGIWAGFIVVSSEESGKGRP

SEQ ID NO: 3388 - protein, 48 aa, Homo sapiens
MIGKKKGTLEEIVLMIVVLVSTQCLIMTMEVVLKNLVIMTEWIMKMTD

SEQ ID NO: 3389 - protein, 30 aa, Homo sapiens
MAMGAASSGWSAPASSSWSTLWWSSFPRPR

SEQ ID NO: 3390 - protein, 227 aa, Homo sapiens
MKPSLLCRPLSCFLMLLPWPLATLTSTTLWQCPPGEEPDLDPGQGTLCRPCPPGTFSAAWGSSPCQPHARCSLWRRLEAQVGMATRDTLCGDCWPGWFGPWGVPRVPCQPCSWAPLGTHGCDEWGRRARRGVEWQQGPAAVVRHGSLGTAPGQVAKNSRPVRGHRHRPCLLPHGAVGHPGVQPPQAEGLPLHGAQRVGPGPGVEAVESTLPTGLRMPMRTPLGSWCA

SEQ ID NO: 3391 - protein, 40 aa, Homo sapiens
MNIYTILKILPHRMLWPFIYLIIATYLFFISSSTHSKGYS

SEQ ID NO: 3392 - protein, 25 aa, Homo sapiens
MLISVMLHSLWLVIHLGPQHTVILF

SEQ ID NO: 3393 - protein, 397 aa, Homo sapiens
MDARRVPQKDLRVKKNLKKFRYVKLISMETSSSSDDSCDSFASDNFANTRLQSVREGCRTRSQCRHSGPLRVAMKFPARSTRGATNKKAESRQPSENSVTDSNSDSEDESGMNFLEKRALNIKQNKAMLAKLMSELESFPGSFRGRHPLPGSDSQSRRPRRRTFPGVASRRNPERRARPLTRSRSRILGSLDALPMEEEEEEDKYMLVRKRKTVDGYMNEDDLPRSRRSRSSVTLPHIIRPVEEITEEELENVCSNSREKIYNRSLGSTCHQCRQKTIDTKTNCRNPDCWGVRGQFCGPCLRNRYGEEVRDALLDPNWHCPPCRGICNCSFCRQRDGRCATGVLVYLAKYHGFGNVHAYLKSLNRNLKCKHNIWKICCLPSTSQIFLVKVSNFFTET

SEQ ID NO: 3394 - protein, 38 aa, Homo sapiens
MFLCCQIGPLGPFRFCFLGAGFLPWTPSLGTVDIKCLA

SEQ ID NO: 3395 - protein, 23 aa, Homo sapiens
MGWSSHWSNFLSVRLWFSTLAIC

SEQ ID NO: 3396 - protein, 34 aa, Homo sapiens
MFYWGGLSFYFLLSSGVGFYCFLFGFGMEIWIAA

SEQ ID NO: 3397 - protein, 58 aa, Homo sapiens
  SITE (54): Xaa equals any of the naturally occurring L-amino acids
MYMPAPPLSLAPAVGETFPVCRERMWSWQAWLLPDSVSSGNTQPSFKKKKTRSXPSDR

SEQ ID NO: 3398 - protein, 33 aa, Homo sapiens
MCVCMHVCVCCVWWEAAWGCQKRAEGGIRPSWT

SEQ ID NO: 3399 - protein, 32 aa, Homo sapiens
MLIITPKLKKVGSQPQMEDWAPLLPSSASLLP

SEQ ID NO: 3400 - protein, 43 aa, Homo sapiens
ELRCLVCFFAFQRHFLAERYNGALQETLCPQHLFCSLADRSWP

SEQ ID NO: 3401 - protein, 30 aa, Homo sapiens
MENCLYVVALMVLMPSVVWKCMIQLEMNGR

SEQ ID NO: 3402 - protein, 32 aa, Homo sapiens
MLRGFFVVLFCLIMNGCWILSHARSASIGMIM

SEQ ID NO: 3403 - protein, 114 aa, Homo sapiens
DRERNMATCAQLLRLVLEAEHIAPAAWHWPWDMGGRGRRVPAYVGRWAGAQTQQAPWGHSSPLHPFILKHLQRASSARLSGAKGTEMRTDSPLGETVFAWSCPQCKAQEWCRGA

SEQ ID NO: 3404 - protein, 46 aa, Homo sapiens
EVIGLLLLLLLLCNNNRQKQRRGESADAWPLPWGFPSAEESVAAQL

SEQ ID NO: 3405 - protein, 59 aa, Homo sapiens
  SITE (34): Xaa equals any of the naturally occurring L-amino acids
CPSVSACCLGLPIWIVGKSKRAWCLPTPPDSSRXKPRPHEACPTRSPMAQTAPPPSHKV

SEQ ID NO: 3406 - protein, 243 aa, Homo sapiens
  SITE (146): Xaa equals any of the naturally occurring L-amino acids
MLVIQITSVDFHGIPLSVPQSLTRRQCTCRGWKEDEPMSRLCINQGERKSRWKEVGRWRKQQLLLALDDGPEGLSLLVTPLWVLFPYLSVTRFLILIPCCEFGSLCWAIQSSSERAKLVLELRCRWGKRGTQLDTKKGSLPSLSPXTVRGILSRQPPNSPSHLPSFVETAFDSPSLSLPFRVSCLVSGLREFLSLLPRTLKELLLKTGEYQAYLYMCNSARIQRKSSFQPLPLGRWFRVPHRD

SEQ ID NO: 3407 - protein, 17 aa, Homo sapiens
LLLLLFMLSLGKPLGRT

SEQ ID NO: 3408 - protein, 44 aa, Homo sapiens
PARLLPPGPAVALLLLRGSCSLCCCHQPHKASCKAMPSAGSNVP

SEQ ID NO: 3409 - protein, 22 aa, Homo sapiens
GSLLSQILHMACDHPRGLTVGA

SEQ ID NO: 3410 - protein, 32 aa, Homo sapiens
MAPAPCSASPRPAGGRDGGGAPELSFLLSVLV

SEQ ID NO: 3411 - protein, 68 aa, Homo sapiens
MLLLFLLNLLPVPQALPALSWPWVFVIAIPLLGSTVLPDLCKAGSLFSFSFALMPLPQSCHCATPVKA

SEQ ID NO: 3412 - protein, 9 aa, Homo sapiens
VFYCYGLII

SEQ ID NO: 3413 - protein, 8 aa, Homo sapiens
HRAVILAL

SEQ ID NO: 3414 - protein, 73 aa, Homo sapiens
  SITE (52): Xaa equals any of the naturally occurring L-amino acids
MALSNSVAPKPSPPWPLLGCFLHSPSHFLVCCILHTFIMFTVALLCSDGHPXRPGVLPGPLLYLECRILGSSD

SEQ ID NO: 3415 - protein, 45 aa, Homo sapiens
MAAAKALISLWLVSACGQWETSFPIYGGDMECQAVVFWWLEEERK

SEQ ID NO: 3416 - protein, 43 aa, Homo sapiens
MAPLPTPLTALGASHLPFRCLSCLDACLFLWGYLNSAHPIGAS

SEQ ID NO: 3417 - protein, 74 aa, Homo sapiens
MLLPQILAWLTPLCSGFCQAVTFSMRPTWATIFNTAVYTASPPTTQHSQALTLLPLFFPFRQPSSNTWDHILIY

SEQ ID NO: 3418 - protein, 34 aa, Homo sapiens
MQCPYLLGAQLLVSSICPVVPALPRPVNKCLVPD

SEQ ID NO: 3419 - protein, 25 aa, Homo sapiens
MSMLFLFCVHVSLLIFLICSPMLYL

SEQ ID NO: 3420 - protein, 17 aa, Homo sapiens
IVILCMCAFSLWVIVRI

SEQ ID NO: 3421 - protein, 21 aa, Homo sapiens
MLAALACSWRLLSLGAHSGRA

SEQ ID NO: 3422 - protein, 64 aa, Homo sapiens
MSSFGKCLFILVLGLFFNWVFVFFFAIDFLKFLDSNLLSDMWFTNIFSYSVDCLFILSIISFAL

SEQ ID NO: 3423 - protein, 59 aa, Homo sapiens
MPGPHQLCLINAGQPCSLVTSVGHWLLGVFSILPCSLLAPGEKGPYRSLFQVTRSWGGP

SEQ ID NO: 3424 - protein, 41 aa, Homo sapiens
MTTSSLAVGCFGWLRLLLHFLDPGNYSHQDDMDQSTVFKHD

SEQ ID NO: 3425 - protein, 6 aa, Homo sapiens
MPFYPC

SEQ ID NO: 3426 - protein, 38 aa, Homo sapiens
MGVLPGLFPFPPSLATVLGVWQLFGFFFFLQLCVCVFV

SEQ ID NO: 3427 - protein, 123 aa, Homo sapiens
ELLILNFCKCFLLQSMVFAKTCGSWRSQACLVGTSMRSVLNPRVKSGRFVKILPDYEHMAYRDVYTCLLHRYRHILGLWQPDIGPYGGLLNVVVDGLFIIVMRRAPPICTVHSTSIAFLFYFF

SEQ ID NO: 3428 - protein, 124 aa, Homo sapiens
  SITE (102): Xaa equals any of the naturally occurring L-amino acids
ELLILNFCKCFLLQSMVFAKTCGSWRSQACLVGTSMRSVLNPRVKSGRFVKILPDYEHMAYRDVYTCLLHRYRHILGLWQPDIGPYGGLLNVVVDGLFIIGXMRRAPPICTVHSTSIAFLFYFF

SEQ ID NO: 3429 - protein, 123 aa, Homo sapiens
MVWLPRPSLGWVWGWSGLAHASHLCLHLCCHPAPPSSSSPTSSSLCASVSCRKKWVEPERRLSEEGRGRAWGGSPTPHPKPQGLPPGSGRGRSWLCGVVAPLLLPCFSHLSCPSLVPTAVHHE

SEQ ID NO: 3430 - protein, 43 aa, Homo sapiens [sequence omitted]

SEQ ID NO: 3431 - protein, 27 aa, Homo sapiens
SFYVLFSNLQWYVFNIFATYTLGKKKM

SEQ ID NO: 3432 - protein, 33 aa, Homo sapiens
MLRQVFFFPLCLGPVRGLLRTVSVIEGLYSFQL

SEQ ID NO: 3433 - protein, 10 aa, Homo sapiens
NTMIAAGSCD

SEQ ID NO: 3434 - protein, 43 aa, Homo sapiens
MTLWKCGRTTLRASLLMIFTSCSWWLGVCLSVLVRQRCQENDG

SEQ ID NO: 3435 - protein, 71 aa, Homo sapiens
WTPSRPRHPWGRWTLATWWPHWTRGLPVTSPLPAITTPSSSHLGRLPLWGPRIRLCLVPCCWSWPRPSTGS

SEQ ID NO: 3436 - protein, 39 aa, Homo sapiens
MAAKSATYWGWHWVDWRWWCTACGVLRFWSGCREGSQLC

SEQ ID NO: 3437 - protein, 51 aa, Homo sapiens
MCWYVISRPLWLNRLCMSSRLFVLPQPSVLITLRPAASVGFLPVGEHISRL

SEQ ID NO: 3438 - protein, 20 aa, Homo sapiens
MLFVLLIWKLYMIYIKTFCF

SEQ ID NO: 3439 - protein, 39 aa, Homo sapiens
LFWSVSETGIAFGVSRVLGMLEGHLQEAWGRREISCDAL

SEQ ID NO: 3440 - protein, 198 aa, Homo sapiens
MFFAPTVLGLARLRHWVYLLCFSAGNYYNQGETRKKELLQSCDVLGIPLSSVMIIDNRDFPDDPGMQWDTEHVARVLLQHIEVNGINLVVTFDAGGVSGHSNHIALYAAVRALHSEGKLPKGCSVLTLQSVNVLRKYISLLDLPLSLLHTQDVLFVLNSKEVAQAKKAMSCHRSQLLWFRRLYIIFSRYMRINSLSFL

SEQ ID NO: 3441 - protein, 28 aa, Homo sapiens
MFQDQELSKLPSAFYLSSIQFNSNHSLP

SEQ ID NO: 3442 - protein, 24 aa, Homo sapiens
MILISVIPSFFPVISAVQTTYEQC

SEQ ID NO: 3443 - protein, 83 aa, Homo sapiens
MCVFVYELMLLSLVFLPHWSLPSLPYFSFALHSNTVKPDIYFLCGSNSLIFPVDKRYVFYSFISLIVNRKQLENWNTFSLCGC

SEQ ID NO: 3444 - protein, 28 aa, Homo sapiens
MPVWKCLLWCTPLLRCTQLLLQLQSRCC

SEQ ID NO: 3445 - protein, 33 aa, Homo sapiens
MCSFHINFCLLSSTFILLTGLCFSVYASNIWVC

SEQ ID NO: 3446 - protein, 88 aa, Homo sapiens
SLKIFSVSGVLQGWPLAPEPLPQCSHQPPPHPSVCRASSTGPHAAFFTHSALGRFVIWLSLHWAEVCVHRVGVPSSPFHSEGHTQRCQ

SEQ ID NO: 3447 - protein, 65 aa, Homo sapiens
MSGAPTAGAALMLCAATAVLLSAQGGPVQSKSPRFASWDEMNVLAHGLLQLGQGLREHAEAPAVS

SEQ ID NO: 3448 - protein, 11 aa, Homo sapiens
ERSSLMSCAFF

SEQ ID NO: 3449 - protein, 72 aa, Homo sapiens
METPQLQVQGQLLHLLLCLYHHKVVQQKLLLLILLKLLKVTTLYPMEQILGSFHQLERSFIGIILSHRLLRP

SEQ ID NO: 3450 - protein, 20 aa, Homo sapiens
MSGVKLQLFGTRLSLPLSSY

SEQ ID NO: 3451 - protein, 26 aa, Homo sapiens
  SITE (3): Xaa equals any of the naturally occurring L-amino acids
MAXGSFLFFCLVHINVATSFLDLGLS

SEQ ID NO: 3452 - protein, 25 aa, Homo sapiens
MTCHIQFVFVPTVRGLNFIILAFCS

SEQ ID NO: 3453 - protein, 30 aa, Homo sapiens
MNSYMCACVFSSEIHLGGGFFCFFNSVPDL

SEQ ID NO: 3454 - protein, 93 aa, Homo sapiens
MRLTDSLFLWVGATPHLRNLAVAMCSRYDSIPVSTSLLGDTSDTTSTGLAQRLARKTNKQVFVSYNLQNTDSNFALLVENRIKEEMEAFPEKF

SEQ ID NO: 3455 - protein, 45 aa, Homo sapiens
MCCWIRFASILLRIFTPMFIRDIGLKFCFFVVSLPSFVIRMMLAS

SEQ ID NO: 3456 - protein, 19 aa, Homo sapiens
MSLLLESCVEPLSFLLLLQ

SEQ ID NO: 3457 - protein, 17 aa, Homo sapiens
MCALGKLCLILQSWHPL

SEQ ID NO: 3458 - protein, 37 aa, Homo sapiens
LISLAFLLPGILGKTNGFSRHPLSTNAFLKQTGTFLL

SEQ ID NO: 3459 - protein, 69 aa, Homo sapiens
MKLLLCFWVNRCACQLACVLSKFHKLKVFKGCVVSELYVSFLSLYLQRVRNEIYTSKVSLINMAFCFSM

SEQ ID NO: 3460 - protein, 69 aa, Homo sapiens; identical to SEQ ID NO: 3459

SEQ ID NO: 3461 - protein, 17 aa, Homo sapiens
SVWGSFLSMLMLLLSVC

SEQ ID NO: 3462 - protein, 28 aa, Homo sapiens
MAISYVSSWIILLDYLGSKDGFQLFPES

SEQ ID NO: 3463 - protein, 19 aa, Homo sapiens
QRPWILTTDLSVFFLCLFP

SEQ ID NO: 3464 - protein, 38 aa, Homo sapiens
MPCGHLRIRAGIAGGSGAAQSLLFPYLESLWECDFDRA

SEQ ID NO: 3465 - protein, 47 aa, Homo sapiens
MNVLCGYGLPIGRWFWGLRIILKLSLTDSPVFYKLTTNLSKDHLGRH

SEQ ID NO: 3466 - protein, 35 aa, Homo sapiens
HSCGPDTCVCPSPVSPCLPVPLAALMVTPKGSNPC

SEQ ID NO: 3467 - protein, 16 aa, Homo sapiens
FLISLCILIPFLILSP

SEQ ID NO: 3468 - protein, 16 aa, Homo sapiens
FLISLCILIPFLILSP

SEQ ID NO: 3469 - protein, 34 aa, Homo sapiens
MWPLIGYLTKSLLNFILCVIIAMCLCVLSSSDTY

SEQ ID NO: 3470 - protein, 35 aa, Homo sapiens
MTSLLQNCVIFVKVVQYMTFNFFFFFFFFFFFFFW

SEQ ID NO: 3471 - protein, 134 aa, Homo sapiens
MLKLILLLLFSGATLSSTWFTLNCLNSITHLPLTTVTLYASCILLGVFLNSSVPIFFELFVETVYPVPEGITCGVVTFLSNMFMGVLLFFLTFYHTELSWFNWCLPGSCLLSLLLILCFRESYDRLYLDVVVSV

SEQ ID NO: 3472 - protein, 39 aa, Homo sapiens
MIVQESPFLTMDLLESCFPYVLLRNAYHAVYKQSVTSSA

SEQ ID NO: 3473 - protein, 35 aa, Homo sapiens
IAWVQRTSCSCFGIGDWYRESARPPEQYVQLPRTP

SEQ ID NO: 3474 - protein, 80 aa, Homo sapiens
MGRMAILACSLPTTWSSLSEAEGTSCPSPLRHGFLIAGRGGLGVDIQHSSRNRTPSEDEASGLPPAWQTQPVTPNAAMAW

SEQ ID NO: 3475 - protein, 13 aa, Homo sapiens
MKLFCVLIVVVVT

SEQ ID NO: 3476 - protein, 26 aa, Homo sapiens
MSQACFPISVKLFETLLCLCFVCACV

SEQ ID NO: 3477 - protein, 25 aa, Homo sapiens
PGHLWGQSCASLPPCALSSELPEFL

SEQ ID NO: 3478 - protein, 44 aa, Homo sapiens
ICVANYRLWCKVCLIFLPLTPANCCILDSLFQYCIKTLVLCWTE

SEQ ID NO: 3479 - protein, 253 aa, Homo sapiens
MNCFLSPLLTLLAKNGAFFAGSILAVLIALTIYDEDVLAVEHVLTTVTLLGVTVTVCRSFIPDQHMVFCPEQLLRVILAHIHYMPDHWQGNAHRSQTRDEFAQLFQYKAVFILEELLSPIVTPLILIFCLRPRALEIIDFFRNFTVEVVGVGDTCSFAQMDVRQHGHPQRLSAGQTEASVYQQAEDGKTELSLMHFAITNPGWQPPRESTAFLGFSRSRFSGMEQLLASPKGVCSLKMPSLRLSSPYNLSLSP

SEQ ID NO: 3480 - protein, 65 aa, Homo sapiens
MAPSTATRHWHAHCFASCRSTGMQRLCGPGIPKNSLPVTSWWTWGASTTLGDTDMTITRGLSQRP

SEQ ID NO: 3481 - protein, 63 aa, Homo sapiens
MQIHMIPVTYELKIRCLLLFVSFSRKMSQQPIRKLYQSTLDYKLTETINNKATQYEYNTPKGT

SEQ ID NO: 3482 - protein, 31 aa, Homo sapiens
MCCSCCGRYPWVLGKHMCSLLWLQIPAYLKS

SEQ ID NO: 3483 - protein, 46 aa, Homo sapiens
GIIQSVLFCAWFVLVNIASGSFISVQGWRTPAYKPNLVLCLFSYGL

SEQ ID NO: 3484 - protein, 9 aa, Homo sapiens
AGAGLPPGS

SEQ ID NO: 3485 - protein, 72 aa, Homo sapiens
MGYNLSPQFTQLLVSRYCPRSANPAMQLDRFIQVCTQLQVLTEAFREKDTAVQGNIRLSFEDFVTMTASRML

SEQ ID NO: 3486 - protein, 10 aa, Homo sapiens
MPLHSSLGGH

SEQ ID NO: 3487 - protein, 10 aa, Homo sapiens
GLVAAVRFIS

SEQ ID NO: 3488 - protein, 33 aa, Homo sapiens
MHLAFHIVFILQAIACFSCSLPVLAAGVDRLLS

SEQ ID NO: 3489 - protein, 26 aa, Homo sapiens
IFLHLLSCSLLFAWTNGEKSAQNEIM

SEQ ID NO: 3490 - protein, 22 aa, Homo sapiens
MNILFILCNLIWLLWGKQHVHK

SEQ ID NO: 3491 - protein, 63 aa, Homo sapiens [sequence omitted]

SEQ ID NO: 3492 - protein, 37 aa, Homo sapiens
MLCQRSVGYKYLALFLGCLFCSIGLCTCCYTSPMLFW

SEQ ID NO: 3493 - protein, 36 aa, Homo sapiens
MISVWFDVLFLSSVSAWVSVCMKWNKLPTAKKKKKK

SEQ ID NO: 3494 - protein, 36 aa, Homo sapiens
  SITE (31): Xaa equals any of the naturally occurring L-amino acids
  SITE (33): Xaa equals any of the naturally occurring L-amino acids
MSSLLLIIILALSLAYKKKKKKLEGGPGTHXPXGGV

SEQ ID NO: 3495 - protein, 10 aa, Homo sapiens
WHPVCSWCLH

SEQ ID NO: 3496 - protein, 13 aa, Homo sapiens
  SITE (12): Xaa equals any of the naturally occurring L-amino acids
MWLVHRRLMSLXL

SEQ ID NO: 3497 - protein, 91 aa, Homo sapiens
MVTFSTALTILIMNLHYCGPSVRPVPAWARALLLGHLARGLCVRERGEPCGQSRPPELSPSPQSPEGGAGPPAGPCHEPRCLCRQKPYCTT

SEQ ID NO: 3498 - protein, 27 aa, Homo sapiens
PAPHLPRLTLPCQVVWGPRCWGGESGS

SEQ ID NO: 3499 - protein, 70 aa, Homo sapiens
MCDVLWGLFILLVHRRGTLPQESRHLSSSSSSSSATEEPPYLGQVSHCLPVMFTTHERTRRFDVSIKLNE

SEQ ID NO: 3500 - protein, 41 aa, Homo sapiens
  SITE (40): Xaa equals any of the naturally occurring L-amino acids
MLLGLLVILVINLWMRQVLISTEFFNRRLCYRSYRFFPGXA

SEQ ID NO: 3501 - protein, 4 aa, Homo sapiens
DKLM

SEQ ID NO: 3502 - protein, 14 aa, Homo sapiens
GKGRLSRGKYYQSS

SEQ ID NO: 3503 - protein, 62 aa, Homo sapiens
DILRLFVALQGCMAGRAGQRPESQRTCPPGVESEWRAGSTGSGAVCHCGGGQADKTQEGDCQ

SEQ ID NO: 3504 - protein, 42 aa, Homo sapiens
LPGSRSRCFIFPLFSHYIVISPTLSLVLFFSWKTRKPLSPKC

SEQ ID NO: 3505 - protein, 66 aa, Homo sapiens
DLLLLFCGDVPCSLYVSSHVCLCTHIASCAVFVSLPLMPASGMMERLWSRLRIMTAYKTDSTLTGK

SEQ ID NO: 3506 - protein, 11 aa, Homo sapiens
MCLPLMPSWPR

SEQ ID NO: 3507 - protein, 265 aa, Homo sapiens
MATLLRPVLRRLCGLPGLQRPAAEMPLRARSDGAGPLYSHHLPTSPLQKALLAAGSAAMALYNPYRHDMVAVLGETTGHRTLKVLRDQMRRDPEGAQILQERPRISTSTLDLGKLQSLPEGSLGREYLRFLDVNRVSPDTRAPTRFVDDEELAYVIQRYREVHDMLHTLLGMPTNILGEIVVKWFEAVQTGLPMCILGAFFGPIRLGAQSLQVLVSELIPWAVQNGRRAPCVLNLYYERRWEQSLRALREELGITAPPMHVQGLA

SEQ ID NO: 3508 - protein, 21 aa, Homo sapiens
EKQLYLESYCLGFLIRHSSPD

SEQ ID NO: 3509 - protein, 21 aa, Homo sapiens
  SITE (14): Xaa equals any of the naturally occurring L-amino acids
MAGRVGYLRYCLFXISALLIF

SEQ ID NO: 3510 - protein, 62 aa, Homo sapiens
MCNLPENLFCFWSTSGVASGPRAFATVLPPAPTSSVCLQSLIYRSPRCLLYSLCAWPFCYLA

SEQ ID NO: 3511 - protein, 60 aa, Homo sapiens
ELWWFWLLWTVLILFSCCCAFRHRRAKLRLQQQQRQRRNQLVGLSWGMPWGWSFPYRFTA

SEQ ID NO: 3512 - protein, 125 aa, Homo sapiens
GRGPVLGPMVYAICYCPLPRLADLEALKVADSKTLLESERERLFAKMEDTDFVGWALDVLSPNLISTSMLGRVKYNLNSLSHDTATGLIQYALDQGVNVTQVFVDTVGCQRHTRRGCSKVFPGLR

SEQ ID NO: 3513 - protein, 38 aa, Homo sapiens
MLPNFSWLLLLCHTAHRSCPPPPYTPRPHPPVRQFKSC

SEQ ID NO: 3514 - protein, 59 aa, Homo sapiens
MLSQTNGSHVASTLLSFAVAWLGILGSSPSPTLSAPSQFLPGPHTLLQLPTLLQSHCRP

SEQ ID NO: 3515 - protein, 14 aa, Homo sapiens
HSSISRSSLSCPYS

SEQ ID NO: 3516 - protein, 33 aa, Homo sapiens
MFWTNLVQYVFCLSFFILLLSQQVENLALLGSM

SEQ ID NO: 3517 - protein, 27 aa, Homo sapiens
  SITE (2): Xaa equals any of the naturally occurring L-amino acids
  SITE (6): Xaa equals any of the naturally occurring L-amino acids
  SITE (18): Xaa equals any of the naturally occurring L-amino acids
  SITE (20): Xaa equals any of the naturally occurring L-amino acids
MXLVHXIIVLIFLPGMTXKXERRKKMC

SEQ ID NO: 3518 - protein, 4 aa, Homo sapiens
FVCI

SEQ ID NO: 3519 - protein, 137 aa, Homo sapiens
LFLLFLVFELPWRRAWETSRGQATDLRTSPPVLGAGRPRSGVSTHARLKRRRRDPLPDRARPPPPLLPQGAWTAGLTCSLLRVCPRTSPPAPRWWRGHGYLSLLLLAWRRAVPALGFWDSSPPGAFCSPCGLSDPSP

SEQ ID NO: 3520 - protein, 50 aa, Homo sapiens
ENSFKKNMSLGSCVVLLPGCKLSPPRASHYHQTSSGPGCEALFLVFRMDL

SEQ ID NO: 3521 - protein, 31 aa, Homo sapiens
MAPLRRLTVWRVGLRLGPAGAAGGPGEASSV

SEQ ID NO: 3522 - protein, 4 aa, Homo sapiens
MWNW

SEQ ID NO: 3523 - protein, 20 aa, Homo sapiens
MGATARPGPTRGRWDSCLRQ

SEQ ID NO: 3524 - protein, 22 aa, Homo sapiens
MPFYIHLWHQMLLIIIVMWWIC

SEQ ID NO: 3525 - protein, 56 aa, Homo sapiens
MRSIWKPTRCWPLCTLLRSTSSQHWQKPVSTFWRQVWKPRTPASCCPRAGCLRSPS

SEQ ID NO: 3526 - protein, 23 aa, Homo sapiens
MLKQLLMIAVGVKLQWKLWLQNR

SEQ ID NO: 3527 - protein, 5 aa, Homo sapiens
MVKNL

SEQ ID NO: 3528 - protein, 45 aa, Homo sapiens
AAAFVGWLSGLLGFSFMVARWHYSNSSIMFVFKTEGKGDGLYQSL

SEQ ID NO: 3529 - protein, 36 aa, Homo sapiens
MAWRWWAKGGPSRLLLWKTTQCLKEVREAPLKTQHT

SEQ ID NO: 3530 - protein, 32 aa, Homo sapiens
MALLILLFCILKYKQLDIAEDGSGGQGQISQM

SEQ ID NO: 3531 - protein, 32 aa, Homo sapiens; identical to SEQ ID NO: 3530

SEQ ID NO: 3532 - protein, 7 aa, Homo sapiens
MGLWWRC

SEQ ID NO: 3533 - protein, 7 aa, Homo sapiens
MGLWWRC

SEQ ID NO: 3534 - protein, 323 aa, Homo sapiens
  SITE (217): Xaa equals any of the naturally occurring L-amino acids
  SITE (226): Xaa equals any of the naturally occurring L-amino acids
  SITE (229): Xaa equals any of the naturally occurring L-amino acids
MELSKAFSGQRTLLSAILSMLSLSFSTTSLLSNYWFVGTQKVPKPLCEKGLAAKCFDMPVSLDGDTNTSTQEVVQYNWETGDDRFSFRSFRSGMWLSCEETVEEPGERCRSFIELTPPAKRENPMVIPGNADHLHRTSIHQLPPATNRLATHWEPCLWAQTERLCCCFLCPVRSPGDVAHMMYSQVFQATVNLGPEDWRPHVWNYGWAFYMACSPSXAAWRRLSPXSTXTPGWCWSSSASIVKSFKENPNCLPHHHQCFPRRLSSAAPTVGPLTSYHQYHNQPIHSVSEGVDFYSELRNKGFQRGASQELKEAVRSSVEEEQC

SEQ ID NO: 3535 - protein, 37 aa, Homo sapiens
VLSCWTWMTWCGWLCPTPSASTHTSRNCTAALCRKDW

SEQ ID NO: 3536 - protein, 7 aa, Homo sapiens
FVKLRHP

SEQ ID NO: 3537 - protein, 88 aa, Homo sapiens
  SITE (28): Xaa equals any of the naturally occurring L-amino acids
  SITE (67): Xaa equals any of the naturally occurring L-amino acids
  SITE (73): Xaa equals any of the naturally occurring L-amino acids
  SITE (74): Xaa equals any of the naturally occurring L-amino acids
AWLSHLMEHHSSHGGRKRYACQGCWKTXHFSLALAEHQKTHEKEKSYALGGARGPQPSTRESQAGAXAGGPPXXVEGEAPPAPPEAQR

SEQ ID NO: 3538 - protein, 34 aa, Homo sapiens
MAAMRHLLRLFSGCGDLGFLTLYIFFLYSKQNNF

SEQ ID NO: 3539 - protein, 23 aa, Homo sapiens
MPFLHTPTVPSIFLRVIIFLFTL

SEQ ID NO: 3540 - protein, 38 aa, Homo sapiens
MLRLAGPPFYWPVLLALLPFASSGFQVSLKVGGCLSSL

SEQ ID NO: 3541 - protein, 12 aa, Homo sapiens
MTSVQQFCIYSE

SEQ ID NO: 3542 - protein, 56 aa, Homo sapiens
MNLWLGALIPVTVHLKRMWSHPKFQAQKTFPLSKSPKYHPVFLLVIIMARSSQLKR

SEQ ID NO: 3543 - protein, 84 aa, Homo sapiens
  SITE (58): Xaa equals any of the naturally occurring L-amino acids
MLVSSHFLFLCFVRLLSSLPLFLTSITFLYSPSSPSLFLSLYSFSYPSFSPLSFLPLXLISFPPPMPSSLFPFPCFFPQPLFLF

SEQ ID NO: 3544 - protein, 1 aa, Homo sapiens
M

SEQ ID NO: 3545 - protein, 20 aa, Homo sapiens
MPQASTHIKAPPPPSPEPGN

SEQ ID NO: 3546 - protein, 129 aa, Homo sapiens
MFHLQPLMFLGLFPLFAVFEGLHLSTSEKIFRFQDTGLLLRVLGSLFLGGILAFGLGFSEFLLVSRTSSLTLSIAGIFKEVCTLLLAAHLLGDQISLLNWLGFASASREYPSTLPSKPCIPEVMVAPRP

SEQ ID NO: 3547 - protein, 13 aa, Homo sapiens
QKAALRLPFPVLL

SEQ ID NO: 3548 - protein, 33 aa, Homo sapiens
MASTTLWLLWKTWLSSGLRCVQRVPSRVFYSGC

SEQ ID NO: 3549 - protein, 8 aa, Homo sapiens
MSLLLFLF

SEQ ID NO: 3550 - protein, 36 aa, Homo sapiens
MTSGEPWACAGCSFPATAAASDFASVLPGVEGSVCC

SEQ ID NO: 3551 - protein, 69 aa, Homo sapiens
MSHFRPARCLPGPCQTLLTFPLLVCAGLRRPPRPHSTQPGSSCSPRHPSFPSLSWVMLLPPCVTFEAVK

SEQ ID NO: 3552 - protein, 207 aa, Homo sapiens
MGRKLSSPTTPRDMLLSPTLRPRRRCLESSVDDAGCPDLGKEPLVFQNRQFAHLMEEPLGSDPFSWKLPSLDYERKTKVDFDDFLPAIRKPQTPTSLAGSAKGGQDGSQRSSIHFETEEANRSFLSGIKTILKKSPEPKEDPAHLSDSSSSSGSIVSFKSADSIKSRPGIPRLAGDGGERTSPERREPGTGRKDDDVASIMKKYLQK

SEQ ID NO: 3553 - protein, 31 aa, Homo sapiens
WLLLCQGHFWVSATATGALGGEGHRVLLGRW

SEQ ID NO: 3554 - protein, 23 aa, Homo sapiens
MFQAPALAFLSGLQLSFVACSIY

SEQ ID NO: 3555 - protein, 37 aa, Homo sapiens
MGLWVFLELVFVHSLLFVLPSLSPCPTHVLRHSGSTW

SEQ ID NO: 3556 - protein, 38 aa, Homo sapiens
MLSPSQTPGSCLKWAPSWVTRCTFWTLVVASLAQKGPK

SEQ ID NO: 3557 - protein, 75 aa, Homo sapiens [sequence omitted]

SEQ ID NO: 3558 - protein, 75 aa, Homo sapiens [sequence omitted]

SEQ ID NO: 3559 - protein, 75 aa, Homo sapiens [sequence omitted]

SEQ ID NO: 3560 - protein, 75 aa, Homo sapiens [sequence omitted]

SEQ ID NO: 3561 - protein, 75 aa, Homo sapiens [sequence omitted]

SEQ ID NO: 3562 - protein, 75 aa, Homo sapiens [sequence omitted]

SEQ ID NO: 3563 - protein, 30 aa, Homo sapiens
FCLFVCLFCMAHVFTIPGALPSFVWIQFSI

SEQ ID NO: 3564 - protein, 21 aa, Homo sapiens
MWLSAFFLARLADSVLEESII

SEQ ID NO: 3565 - protein, 27 aa, Homo sapiens
MASWICVFCTSPSGCSATCLVCYPAFP

SEQ ID NO: 3566 - protein, 34 aa, Homo sapiens
MLFFFSIALSSFFFLNLFLCLCNSRVIGIVLTIS

SEQ ID NO: 3567 - protein, 71 aa, Homo sapiens
ERCLSLLFAAIIKIPIHGVNYNEEKFISWSSGGWGVPKSRCWHLVRSFLLSTPWWRVEGQKEREGWRPIGG

SEQ ID NO: 3568 - protein, 32 aa, Homo sapiens
MSVFRVIQILLFPFSLRYSLGDLMYLNLTTIY

SEQ ID NO: 3569 - protein, 118 aa, Homo sapiens
MDLAGLLKSQFLCHLVFCYVFIASGLIINTIQLFTLLLWPINKQLFRKINCRLSYCISSRLQGPGQERAGLCPNYRLDVVLHRDGLLFAQVGAGSQDGCHQFAAPPGLPREVFFPDSL

SEQ ID NO: 3570 - protein, 42 aa, Homo sapiens
EWVKGIVIWQFYLLFYACLSSACLFSPSANIPFMPWAFSTVL

SEQ ID NO: 3571 - protein, 63 aa, Homo sapiens
  SITE (45): Xaa equals any of the naturally occurring L-amino acids
  SITE (49): Xaa equals any of the naturally occurring L-amino acids
YITSCRLTTSFFCCFRNLLSIIRLQDSASSCLDSISKSPSSCPSXMSVXTPQYIKKSISESGL

SEQ ID NO: 3572 - protein, 54 aa, Homo sapiens
MWCLSHLSLSLSLSHLSLARRAGRPMPWCPATQLVILWLQNWWSPMMDMRRSLR

SEQ ID NO: 3573 - protein, 58 aa, Homo sapiens
MGFPLWITRPFSLAALNVFFIPFNLGESDDYVSWGCSSREVSLWWSLSFLNLNVGLSC

SEQ ID NO: 3574 - protein, 58 aa, Homo sapiens; identical to SEQ ID NO: 3573

SEQ ID NO: 3575 - protein, 33 aa, Homo sapiens
LPRLQSALLLLPLPPTLQGHVRAPIYPPPACRS

SEQ ID NO: 3576 - protein, 18 aa, Homo sapiens
MPHPCLPVSTHLEGRWGC

SEQ ID NO: 3577 - protein, 266 aa, Homo sapiens
MQIVKLLGLDVPSLCLAELVKTYCSSFKLFQASPSVPAKYVEDKEKMLSRTMQLVELANETWLVTGRHPLPVITAATFLAWQSLQPADRLSCSLARFCKLANVDLPYPASSRLQELLAVLLRMAEQLAWLRVLRLDKRSVVKHIGDLLQHRQSLVRSAFRDGTAEVETREKEPPEWGQGQGEGEVGNNSLGLPQGKRPASPALLLPPCMLKSPKRICPVPPVSTVTGDENISDSEIEQYLRTPQEVRDFQRAQAARQAATSVPNPP

SEQ ID NO: 3578 - protein, 8 aa, Homo sapiens
SLFWGCPW

SEQ ID NO: 3579 - protein, 28 aa, Homo sapiens
MKKRLSPLSWARCCLCFWLQWGRRTNRL

SEQ ID NO: 3580 - protein, 81 aa, Homo sapiens
MYLHSLPFCFAGISCLCCLSKLPVEILSILIINMSLDSYRLYQPALSFCQTELSPLFPYKADLYSCFSRYCLYISLFHSPL

SEQ ID NO: 3581 - protein, 12 aa, Homo sapiens
AGGLGLHARCWR

SEQ ID NO: 3582 - protein, 22 aa, Homo sapiens
ILIFMVFPFVLVFASLTSVISI

SEQ ID NO: 3583 - protein, 18 aa, Homo sapiens
MVAWTSTWSRAWQSTLRM

SEQ ID NO: 3584 - protein, 151 aa, Homo sapiens
  SITE (4): Xaa equals any of the naturally occurring L-amino acids
  SITE (9): Xaa equals any of the naturally occurring L-amino acids
  SITE (14): Xaa equals any of the naturally occurring L-amino acids
  SITE (17): Xaa equals any of the naturally occurring L-amino acids
  SITE (36): Xaa equals any of the naturally occurring L-amino acids
  SITE (69): Xaa equals any of the naturally occurring L-amino acids
  SITE (71): Xaa equals any of the naturally occurring L-amino acids
  SITE (87): Xaa equals any of the naturally occurring L-amino acids
  SITE (92): Xaa equals any of the naturally occurring L-amino acids
  SITE (95): Xaa equals any of the naturally occurring L-amino acids
  SITE (108): Xaa equals any of the naturally occurring L-amino acids
  SITE (119): Xaa equals any of the naturally occurring L-amino acids
  SITE (150): Xaa equals any of the naturally occurring L-amino acids
MRVXAPRTXLLLLXGAXALTETWAGSHSMRYFYTAXSRPGRGEPRFIAVGYVDDTQFVRFDSDARVRGXSXGRLRRQGLHRPERGPXLLDRXGHXGSDHPAQVGGGPXGGAAESLPGGXVRGVAPQIPGEREGDAAARGPPKDTRDPPPXL

SEQ ID NO: 3585 - protein, 132 aa, Homo sapiens
LLRPLAWLVLRAPRGGAQTPLYCALQEGIEPLSGRYFANCHVEEVPPAARDDRAAHRLWEASKRLAGLGPGEDAEPDEDPQSEDSEAPSSLSTPHPEEPTVSQPYPSPQSSPDLSKMTHRIQAKVEPEIQLS

SEQ ID NO: 3586 - protein, 66 aa, Homo sapiens
ETVGCGFSLSFFFNFLCWVFEQPHVPFPGSLLIYLLELKWMGSRALCVSMLCFLTRLHSEALMPFG

SEQ ID NO: 3587 - protein, 29 aa, Homo sapiens
MATLSLRAGLGFCFLLGLTEYFVGFHLIP

SEQ ID NO: 3588 - protein, 29 aa, Homo sapiens
MLIRLYMVCGCFLPTTVELNSCIRDLMAC

SEQ ID NO: 3589 - protein, 16 aa, Homo sapiens
MTCCLLRSGVPVCLSL

SEQ ID NO: 3590 - protein, 78 aa, Homo sapiens
MSPHQPMQVSSSKTILWLVLSCLCPSSPHPVISGLPQWYIGVLAGIVPVAPIRPGDSGLDLQREGPQPILSQGLNRRT

SEQ ID NO: 3591 - protein, 37 aa, Homo sapiens
MGLRRHFPALWVLWWPWCPSWRQTRTPSAPSMQMATR

SEQ ID NO: 3592 - protein, 26 aa, Homo sapiens
CGTAYCLFTPSPGMPQASAFHCSSLF

SEQ ID NO: 3593 - protein, 39 aa, Homo sapiens
ALRGPAFNWLLCCSSTIFCRAQIALLPLSPASTPSPTTR

SEQ ID NO: 3594 - protein, 33 aa, Homo sapiens
MLLGTYFKVYLIFKCFYIFLYKSRKMHFHLQKS

SEQ ID NO: 3595 - protein, 32 aa, Homo sapiens
  SITE (9): Xaa equals any of the naturally occurring L-amino acids
MGLVERLLXCFTHGLWQFAQTAPIRTPLAAFA

SEQ ID NO: 3596 - protein, 196 aa, Homo sapiens
MWFMYLLSWLSLFIQVAFITLAVAAGLYYLAELIEEYTVATSRIIKYMIWFSTAVLIGLYVFERFPTSMIGVGLFTNLVYFGLLQTFPFIMLTSPNFILSCGLVVVNHYLAFQFFAEEYYPFSEVLAYFTFCLWIIPFAFFVSLSAGENVLPSTMQPGDDVVSNYFTKGKRGKRLGILVVFSFIKEAILPSRQKIY

SEQ ID NO: 3597 - protein, 47 aa, Homo sapiens
MRQRQSHYCSVLFLSVNYLGGTFPVYQKSRNLQRDKIQETFAQKRIK

SEQ ID NO: 3598 - protein, 46 aa, Homo sapiens
GRRRAQLLWHIIFLQLYFWARWQREGSVMPPHRHSIRRRVDSFWML

SEQ ID NO: 3599 - protein, 22 aa, Homo sapiens
MLLAVILQLIPPVTKAFVYELT

SEQ ID NO: 3600 - protein, 5 aa, Homo sapiens
MPCLF

SEQ ID NO: 3601 - protein, 29 aa, Homo sapiens
MGKKHHVGRTAWVFALVVVCILGPLLCSS

SEQ ID NO: 3602 - protein, 43 aa, Homo sapiens
MVPLLRLCSSFVLLLFCYVTAKKKKKKEKKSANCVHAFLPAGM

SEQ ID NO: 3603 - protein, 90 aa, Homo sapiens
MNIKCFVMCGGLYLASILVTWREHGSPHFLDEHTNVLRKCMIGSKLQNHLPSRIIPIICTASPGANGFIQRGSTELWVIRRQYPRVRVFP

SEQ ID NO: 3604 - protein, 50 aa, Homo sapiens
MYIFELSLYLEGTSFVVVLLFLLISVSLDSPPTTKGWGLCLTYLGALIVQ

SEQ ID NO: 3605 - protein, 3 aa, Homo sapiens
VER

SEQ ID NO: 3606 - protein, 35 aa, Homo sapiens
MFPCCWAHLQRGGKVLCLLVLLVLSLPTEHHVANK

SEQ ID NO: 3607 - protein, 32 aa, Homo sapiens
MGSWLWTVANLLHIPPNLYRMLAGRWQRAHWD

SEQ ID NO: 3608 - protein, 24 aa, Homo sapiens
MASELARLLHAFGLMGPRKAGESS

SEQ ID NO: 3609 - protein, 66 aa, Homo sapiens
  SITE (31): Xaa equals any of the naturally occurring L-amino acids
MQLEALNLLHTLVWARSLCRAGAVQTQERLXGSASPEQVPAGECCALQEYEAAVGAAQERADPGAG

SEQ ID NO: 3610 - protein, 62 aa, Homo sapiens
  SITE (25): Xaa equals any of the naturally occurring L-amino acids
MLPSPKPAPLPHFPVAPLVLFAHWXLCSSKGVLPEVRGLSLHPLGHGAAVPALPLPEAAAPA

SEQ ID NO: 3611 - protein, 62 aa, Homo sapiens
  SITE (25): Xaa equals any of the naturally occurring L-amino acids
  SITE (45): Xaa equals any of the naturally occurring L-amino acids
MLPSPKPAPLPHFPVAPLVLFAHWXLCSSKGVLPEVRGLSLHPLXHGAAVPALPLPEAAAPA

SEQ ID NO: 3612 - protein, 17 aa, Homo sapiens
QTHYYDLPKDSLQVVNH

SEQ ID NO: 3613 - protein, 40 aa, Homo sapiens
MRMKTRTKTLRKAQMLFRLLTLRMDLLVLLLPRLDCPQTR

SEQ ID NO: 3614 - protein, 5 aa, Homo sapiens
MKAHH

SEQ ID NO: 3615 - protein, 36 aa, Homo sapiens
MMFSLLLTTCLSRKACGVRMMWPISMWKQRKETDIA

SEQ ID NO: 3616 - protein, 36 aa, Homo sapiens; identical to SEQ ID NO: 3615

SEQ ID NO: 3617 - protein, 32 aa, Homo sapiens
MPAWKCPCIRGLLHSLLLREASASAQGVCAAL

SEQ ID NO: 3618 - protein, 112 aa, Homo sapiens
  SITE (27): Xaa equals any of the naturally occurring L-amino acids
MPLFLSIPSLFLTLSGLGLAVQSPAGXCWGLSLCRHCVFLRGCPQNTPPAPWGSSGSHFSWSLRSQKQLLQEAKKRLGWLLVLMMAFILLGHFGYIHGHCFHLSFLPVPPLP

SEQ ID NO: 3619 - protein, 40 aa, Homo sapiens
MQKFIQAMLRKLLLMQMMCDWQSSAALISLLPLLPQEIFY

SEQ ID NO: 3620 - protein, 40 aa, Homo sapiens
MCFNFKYFFLCGKCHVTIALPSVWTVLVLVLSVYQKSGCL

SEQ ID NO: 3621 - protein, 246 aa, Homo sapiens
MQPSWLTRCPTWPWPMGAAWPRRARSWWIRTSTASSPSPSSSITLLWTPCMWAESWACCSSPTYTRTGKCSTNRTPRWPPALTSMPRTSTFQQWAFITYVLVAGLALGTQDRFSPDLLGLQASSALAWLTLEVLAILLSLYLVTVNTDLTTIDLVAFLGYKYVGMIGGVLMGLLFGKIGYYLVLGWCCVAIFVFMIRTLRLKILADAAAEGVPVRGARNQLRMYLTMAVAAAQPMLMYWLTFHLVR

SEQ ID NO: 3622 - protein, 27 aa, Homo sapiens
  SITE (8): Xaa equals any of the naturally occurring L-amino acids
VFWPTSEXLLNCMVWGREGNLKSRPNK

SEQ ID NO: 3623 - protein, 111 aa, Homo sapiens
MTESFYPLNQRKQNENPSAVLMHLFLFSVTMQQVARTVAKVELSDHVCDVVFALFDCDGNGELSNKEFVSIMKQRLMRGLEKPKDMGFTRLMQAMWKCAQETAWDFALPKQ

SEQ ID NO: 3624 - protein, 47 aa, Homo sapiens
MTPPHVLLKGVLVVSRVCVSLLCCPPGCSVCCPLPPGGSPCFSPIYS

SEQ ID NO: 3625 - protein, 48 aa, Homo sapiens [sequence omitted]

SEQ ID NO: 3626 - protein, 25 aa, Homo sapiens
MVCIFKTEDVLPFLLLFFLFSFFFF

SEQ ID NO: 3627 - protein, 104 aa, Homo sapiens
MVAGTPCFLPLLSACVTHINGNNFFQLLAEVGEAGSLHREGLSSLLLPASFCFGCREWFIHTLIPSPPLVDGGLAFSIPVFWCLPLSATLNHLSWSCCVMGTCL

SEQ ID NO: 3628 - protein, 19 aa, Homo sapiens
VCLLCIPGAQNRAWHIVGA

SEQ ID NO: 3629 - protein, 83 aa, Homo sapiens [sequence omitted]

SEQ ID NO: 3630 - protein, 104 aa, Homo sapiens [sequence omitted]

SEQ ID NO: 3631 - protein, 59 aa, Homo sapiens
LLGTWLCPQLPPGLGAHHAPSSFSSYLCPVSPSIRLSDGTLWERLWPWSGGREQGGRHK

SEQ ID NO: 3632 - protein, 36 aa, Homo sapiens
  SITE (9): Xaa equals any of the naturally occurring L-amino acids
MGVFFILRXLTSQCFLSWFLGFVSAESFEQWSISGS

SEQ ID NO: 3633 - protein, 29 aa, Homo sapiens
  SITE (6): Xaa equals any of the naturally occurring L-amino acids
MCCHIXQIATVLLLSLCWLCATLMVPRNR

SEQ ID NO: 3634 - protein, 51 aa, Homo sapiens
MPWFVPLVSWEELAPAQLSCHWPFRVGLGPECLLVASHGGLMAQPSPKRAQ

SEQ ID NO: 3635 - protein, 27 aa, Homo sapiens
MALAGFFLPWTHCCRLSLKFLCGVTRS

SEQ ID NO: 3636 - protein, 15 aa, Homo sapiens
MLIVLLINLSSEPSC

SEQ ID NO: 3637 - protein, 3 aa, Homo sapiens
MST

SEQ ID NO: 3638 - protein, 32 aa, Homo sapiens [sequence omitted]

SEQ ID NO: 3639 - protein, 39 aa, Homo sapiens
MFQLCLEIFQFFVSVFISFLESLAEFQETVAHLLVMKCF

SEQ ID NO: 3640 - protein, 126 aa, Homo sapiens
MERLGVLWTLLVSRWFICLFVDILPVETVLRIWDCLFNEGSKIIFRVALTLIKQHQELILEATSVPDICDKFKQITKGSFVMECHTFMQVCGAARGSVPSQGAPPHLQPGGCSDHPEGAQDGHQWA

SEQ ID NO: 3641 - protein, 35 aa, Homo sapiens
MKLSCCFFGALEWTFLAAVTLGPLPSRVLLCHRGC

SEQ ID NO: 3642 - protein, 31 aa, Homo sapiens
MLLCVLIVHCFLFLNSLALYGCPTVVYPLAS

SEQ ID NO: 3643 - protein, 15 aa, Homo sapiens
MNSGGSGWCGPSSSS

SEQ ID NO: 3644 - protein, 32 aa, Homo sapiens
MLSLALLWPIFILFTVQCHLFGNTQHQRVLPN

SEQ ID NO: 3645 - protein, 32 aa, Homo sapiens; identical to SEQ ID NO: 3644

SEQ ID NO: 3646 - protein, 46 aa, Homo sapiens
MNFFLGLWLLYILYILRILYTILIYCNTAVFDNLDSIWYMNFCIHY

SEQ ID NO: 3647 - protein, 66 aa, Homo sapiens
  SITE (61): Xaa equals any of the naturally occurring L-amino acids
MKRTLLSSVICLSASPAQGQAPWQCPAVTGDSAEVTYPEKPLHGLSRREKTALPGPWFGLXRGKGP

SEQ ID NO: 3648 - protein, 38 aa, Homo sapiens
MILSVLRNTGLCTSLFMGLWILFILRPVYNCFLPKGIV

SEQ ID NO: 3649 - protein, 57 aa, Homo sapiens [sequence omitted]

SEQ ID NO: 3650 - protein, 55 aa, Homo sapiens
MESLGPDIWLISGIASSPSFLHVLVVVVVGECGWGMSWLMPAKISSHPPCLSSLF

SEQ ID NO: 3651 - protein, 27 aa, Homo sapiens
MGALVELLYIFPFLLPSFLSEKLLEKK

SEQ ID NO: 3652 - protein, 36 aa, Homo sapiens
MPAGVGWWVCLHVRVCLGSFKGERGTHHHAGSALKR

SEQ ID NO: 3653 - protein, 34 aa, Homo sapiens
MLCLIAILLYVLVQYLVNPGVLRTDPRYEAAPGP

SEQ ID NO: 3654 - protein, 45 aa, Homo sapiens
MCILCYTQGPKFLQLFIHAIVLLFAEMEIIYTELQIPEMFHLYLI

SEQ ID NO: 3655 - protein, 23 aa, Homo sapiens
CLQWFVPLVPQQIPELILMTIWK

SEQ ID NO: 3656 - protein, 123 aa, Homo sapiens
MVWQPFFYLFNQEDAGELCCLSCWLVAALCPGVCMWVYLELLSLPSHCKLHPDETAVVLGLFHLSLPVPASSWLSCAWDMGLPICVFSKSGADQEHTKVWSCIITNIHSSGTFLRYIYKSFQQ

SEQ ID NO: 3657 - protein, 123 aa, Homo sapiens; identical to SEQ ID NO: 3656

SEQ ID NO: 3658 - protein, 87 aa, Homo sapiens [sequence omitted]

SEQ ID NO: 3659 - protein, 31 aa, Homo sapiens
MLVFVLLWISHLFSGRSEHCSLVQSSYFPSS

SEQ ID NO: 3660 - protein, 41 aa, Homo sapiens [sequence omitted]

SEQ ID NO: 3661 - protein, 35 aa, Homo sapiens
MTIICLLFLTLLLLLFKGIVQSSILYLWQQVKVSR

SEQ ID NO: 3662 - protein, 17 aa, Homo sapiens
LLCVLAGLTLLHHCQLA

SEQ ID NO: 3663 - protein, 58 aa, Homo sapiens
MQQKEPWAWSMQNWFLLQLLLLVGSGRKHIEFMIMVNLWRERGDQDEGASRRSCSSVH

SEQ ID NO: 3664 - protein, 19 aa, Homo sapiens
KFWFAFELFLFMWLLIISS

SEQ ID NO: 3665 - protein, 32 aa, Homo sapiens
MVLHFLDTILIFLIPPPTFQIASLMPQRLLCP

SEQ ID NO: 3666 - protein, 65 aa, Homo sapiens
  SITE (28): Xaa equals any of the naturally occurring L-amino acids
  SITE (42): Xaa equals any of the naturally occurring L-amino acids
MVPLLFLPLDSWLWREKKYHLLDADSEXIYSPLENSALPASXCHLAGAITESSKGHPIILLGQLL

SEQ ID NO: 3667 - protein, 18 aa, Homo sapiens
MEVFLYLGVVGFWHIGIS

SEQ ID NO: 3668 - protein, 30 aa, Homo sapiens
MNFQVWGTGQCTFLSLFILLFLKICNTYQR

SEQ ID NO: 3669 - protein, 32 aa, Homo sapiens
MISRGITIYLTVLLTYTVVLFYLFKSGFSAFH

SEQ ID NO: 3670 - protein, 32 aa, Homo sapiens
MALQAFSSLLLHILSTSTHYPVPKPLPHFQAL

SEQ ID NO: 3671 - protein, 37 aa, Homo sapiens
MVSVSRQTLVTFSLVYVPFLLLHIFGSKSYWLNQQGL

SEQ ID NO: 3672 - protein, 36 aa, Homo sapiens
MPGKLNPCLLWLLILMLFKKCKKASLVSKRSWIYIA

SEQ ID NO: 3673 - protein, 25 aa, Homo sapiens
MKKRLSPLSWARCCLCFWLQVGTTN

SEQ ID NO: 3674 - protein, 17 aa, Homo sapiens
MLSPGRCFAIWSLFLCS

SEQ ID NO: 3675 - protein, 65 aa, Homo sapiens
MPFWILPHVDCLCVCMFGVRMCETLLWFWESELYRTVYKMSLPHHPYSALLTLFFPPSSHSHSSF

SEQ ID NO: 3676 - protein, 9 aa, Homo sapiens
MFMMSVYIL

SEQ ID NO: 3677 - protein, 41 aa, Homo sapiens
MSMCKVRRGSLNYLLLFWLTSPIFKTLSNSQNLLMRHVVLN

SEQ ID NO: 3678 - protein, 66 aa, Homo sapiens
WLRFWCVFSSCSQLGLGLPKRWISVSTKIQQIITVSPFNPFRDKVRIIYNGTLALQGLFTWYLSYY

SEQ ID NO: 3679 - protein, 39 aa, Homo sapiens
MGASQCPFAAALRPLHFLLWVAALLGLQQPLQRLQLRNA

SEQ ID NO: 3680 - protein, 35 aa, Homo sapiens
MSIQIICCLWFFLYLITCQKPSLPLDFFILPSSEV

SEQ ID NO: 3681 - protein, 30 aa, Homo sapiens
MWQIAMITLWSLLVSGNHQLELRMLDTVPR

SEQ ID NO: 3682 - protein, 39 aa, Homo sapiens
MFQDILALCLWLLPGVWHHSVVTYNHCLGTHRVNCLSDK

SEQ ID NO: 3683 - protein, 33 aa, Homo sapiens [sequence omitted]

SEQ ID NO: 3684 - protein, 3 aa, Homo sapiens
MCA

SEQ ID NO: 3685 - protein, 33 aa, Homo sapiens
MIWSIVTCWICVCTGVFMQGRLNSQVRGESEPH

SEQ ID NO: 3686 - protein, 34 aa, Homo sapiens
MTVSFVMRFLALISNSFFLPLSLGATPDPCQVFL

SEQ ID NO: 3687 - protein, 33 aa, Homo sapiens
MSASILCSFVHSVFFISGCFSVVFRKMIITLFM

SEQ ID NO: 3688 - protein, 180 aa, Homo sapiens
MHQCEIWRELFSPLHALNFGIGGDGTQHVLWRLENGELEHIRPKIVVVWVGTNNHGHTAEQVTGGIKAIVQLVNERQPQARVVVLGLLPRGQHPNPLREKNRQVNELVRAALAGHPRAHFLDADPGFVHSDGTISHHDMYDYLHLSRLGYTPVCRALHSLLLRLLAQDQGQGAPLLEPAP

SEQ ID NO: 3689 - protein, 35 aa, Homo sapiens
MKMNKLFWIRILKLLLQALSQCKLLIKGKLQCPRI

SEQ ID NO: 3690 - protein, 39 aa, Homo sapiens
MAMGHLVFISGIIQLVKGMYLSAWYPLQKSWNLTWHNKP

SEQ ID NO: 3691 - protein, 5 aa, Homo sapiens
MWTCK

SEQ ID NO: 3692 - protein, 39 aa, Homo sapiens
MFRRGFGSFCFCFLKHVFHSHLGILEAGQLAGFLGCRET

SEQ ID NO: 3693 - protein, 31 aa, Homo sapiens
MPCPFAHLVLLVVTSLVTGKVSKDIGVEHPG

SEQ ID NO: 3694 - protein, 35 aa, Homo sapiens
MVKLLVKLTFIISPLIKSSDSGITSLSCSYQRAIF

SEQ ID NO: 3695 - protein, 17 aa, Homo sapiens
MQKLKGGISVFLAFLLM

SEQ ID NO: 3696 - protein, 37 aa, Homo sapiens
MILKQGLICTWQVLLLASALEMLVFICAMECLTQFQV

SEQ ID NO: 3697 - protein, 53 aa, Homo sapiens [sequence omitted]

SEQ ID NO: 3698 - protein, 31 aa, Homo sapiens
MTESLLYLQLILLWGISEIPSSNTEMYRKCP

SEQ ID NO: 3699 - protein, 16 aa, Homo sapiens
MQKGRAVCLSPDLAHG

SEQ ID NO: 3700 - protein, 16 aa, Homo sapiens
MQKGRAVCLSPDLAHG

SEQ ID NO: 3701 - protein, 61 aa, Homo sapiens
MRVLILNVSMFLRSLAYILWCSHWKWKNGIIYIIYINIYYTYSPYFISVTIPIEFDKNCYD

SEQ ID NO: 3702 - protein, 5 aa, Homo sapiens
MHIIQ

SEQ ID NO: 3703 - protein, 92 aa, Homo sapiens
  SITE (32): Xaa equals any of the naturally occurring L-amino acids
MHFLFGYYVFSLTSASPALWAAASTCSSDLDXPCWVLVHLLIWCFVCHQYLHCSWWDVSHHLLYLLPTRKIKRSYFFPLRSNFSLDSWYPQF

SEQ ID NO: 3704 - protein, 11 aa, Homo sapiens
MFVCLFLINNI

SEQ ID NO: 3705 - protein, 120 aa, Homo sapiens
VVFGASLFLLLSLTVFSIVSVTAYIALALLSVTISFRIYKGVIQAIQKSDEGHPFRAYLESEVAISEELVQKYSNSALGHVNCTIKELRRLFLVDDLVDSLKLSFHSSVFLLFMNGIRHR

SEQ ID NO: 3706 - protein, 44 aa, Homo sapiens
MDTWIFLLVTKIFKLFVYTHTHTHTHTHVSVPRNVYRGGQFSED

SEQ ID NO: 3707 - protein, 34 aa, Homo sapiens
  SITE (28): Xaa equals any of the naturally occurring L-amino acids
MIIWFLPFTLLVWFITFIDLFMLNHPCXPGINLT

SEQ ID NO: 3708 - protein, 5 aa, Homo sapiens
HACFL

SEQ ID NO: 3709 - protein, 32 aa, Homo sapiens
MFCGACQIGWNLWGLLWEMPREHRFRRWEQLV

SEQ ID NO: 3710 - protein, 23 aa, Homo sapiens
MSVQRWALKLTLILLVEKSLKAI

SEQ ID NO: 3711 - protein, 39 aa, Homo sapiens
  SITE (19): Xaa equals any of the naturally occurring L-amino acids
MLNNFLGINLQAWTSRLSXQFLLTFATYCYANFQKNCTQ

SEQ ID NO: 3712 - protein, 1 aa, Homo sapiens
M

SEQ ID NO: 3713 - protein, 49 aa, Homo sapiens
MAPKFFVSTGISPMAPIATAKPTAPPVLPASLPDRRCLQSHTQSSGHLP

SEQ ID NO: 3714 - protein, 72 aa, Homo sapiens
MWMSLVLHHSLPLGVTVALHCACFVAKNSGIPSGERSCFQGNRQAGSEVQEKATEAWKGSSCICASCARRTL

SEQ ID NO: 3715 - protein, 35 aa, Homo sapiens
MKTQNHCIFCIVILFSTSVPPLIWSWQCVSVHSLF

SEQ ID NO: 3716 - protein, 34 aa, Homo sapiens
MLKVCVCVCVCVCVCVSYPLKKGLYNKSASHWLL

SEQ ID NO: 3717 - protein, 5 aa, Homo sapiens
MNGLL

SEQ ID NO: 3718 - protein, 39 aa, Homo sapiens
MRSSGAWQAMVGVWILFLSAVESQGRVLAEQRCNLAWAL

SEQ ID NO: 3719 - protein, 26 aa, Homo sapiens
MYCISWEVYFMSFLAFFFPTATANEG

SEQ ID NO: 3720 - protein, 25 aa, Homo sapiens
MSLFFIWQLTKLLKAQPNCTFARTF

SEQ ID NO: 3721 - protein, 92 aa, Homo sapiens
  SITE (77): Xaa equals any of the naturally occurring L-amino acids
MAVLAGSLLGPTSRSAALLGGRWLQPRAWLGFPDAWGLPTPQQARGKARGNEYQPSNIKRKNKHGWVRRLSTPAGVXVILRRMLKGRKSLSH

SEQ ID NO: 3722 - protein, 35 aa, Homo sapiens
MIKLVHQIVILCVMRIVAGVILKCWYLDRTASPGF

SEQ ID NO: 3723 - protein, 72 aa, Homo sapiens
MLDVFLKSCFVSFLSLIVKLLNINRFAQPQRMRVDNTEEVMQKQKITLLIIDSITNKCLFLSLPPFLPLPSS

SEQ ID NO: 3724 - protein, 37 aa, Homo sapiens
MLLCTHTSLLLYFSFWMGLAKTGSGQRPPKLYVLPVS

SEQ ID NO: 3725 - protein, 17 aa, Homo sapiens
MPLGLPLSASGFSVGDL

SEQ ID NO: 3726 - protein, 66 aa, Homo sapiens [sequence omitted]

SEQ ID NO: 3727 - protein, 39 aa, Homo sapiens
MRFCCLILQILTRLVLTKYGRSGIRWKKEGSSCCCSYSC

SEQ ID NO: 3728 - protein, 34 aa, Homo sapiens
MWRWKAVTLMILTLSRSRLMCAFVSWFLTKKFKR

SEQ ID NO: 3729 - protein, 52 aa, Homo sapiens
MTASPDYLVVLFGITAGATGAKLGSDEKELILLFWKVVDLANKKVGQLHESS

SEQ ID NO: 3730 - protein, 45 aa, Homo sapiens
MRAAVQTCLPSQALASLTWQRLCPGLSPPRAMSLMAVLTERSQIV

SEQ ID NO: 3731 - protein, 35 aa, Homo sapiens
MLFMAHLLLRTHPLSLWVTSRQAKDWCFSFHPLEG

SEQ ID NO: 3732 - protein, 35 aa, Homo sapiens; identical to SEQ ID NO: 3731

SEQ ID NO: 3733 - protein, 70 aa, Homo sapiens
MSPSQSGVGISGLGLFLSKTPLFSLILKVIFLRTELLPKERDGFPRRHSWPSVDLSVHLLALLADSSGWA

SEQ ID NO: 3734 - protein, 102 aa, Homo sapiens
  SITE (72): Xaa equals any of the naturally occurring L-amino acids
MTGVQVQWTVIFLAPVIAVILCAMQTMLRSLWLMDLTLTVSQVVEERKQMKGKKKHGIQQKKTLELIVNMMXVARVGEKCSTCISKLNLMLQMKVLGKDING

SEQ ID NO: 3735 - protein, 36 aa, Homo sapiens
  SITE (16): Xaa equals any of the naturally occurring L-amino acids
MSHCWTLLALSLWGLXVSQGRETWWRWPHGLGPPCS

SEQ ID NO: 3736 - protein, 44 aa, Homo sapiens
LIGVFPPHLLSSLKCVPDAFICCFTSMFCFSSSLCSLPVYPLSL

SEQ ID NO: 3737 - protein, 10 aa, Homo sapiens
MIVTKMYFHV

SEQ ID NO: 3738 - protein, 16 aa, Homo sapiens
EKIDQQFTFAVCLVFV

SEQ ID NO: 3739 - protein, 12 aa, Homo sapiens
NWLDLFVLGFSS

SEQ ID NO: 3740 - protein, 53 aa, Homo sapiens
MGQRGVFLLILDAFSVPSTASCLITPLPPPHPQPSQFFLASALQPYLGKEEWV

SEQ ID NO: 3741 - protein, 53 aa, Homo sapiens; identical to SEQ ID NO: 3740

SEQ ID NO: 3742 - protein, 37 aa, Homo sapiens
MLQMCIYAQWYAYLCVTVSVASWLDPTISSEIMHPKG

SEQ ID NO: 3743 - protein, 17 aa, Homo sapiens
MLFFCQALFVLAVYYIF

SEQ ID NO: 3744 - protein, 38 aa, Homo sapiens
MRTALFPTECCLPMCVVLAVFYLPIVFSRIIESADSFD

SEQ ID NO: 3745 - protein, 56 aa, Homo sapiens
MFLASFSSPGFQLSFSSSSNMASAHKSLLCQDLMVLHLPEPSSASVPRPQLVRLTH

SEQ ID NO: 3746 - protein, 56 aa, Homo sapiens
GWFHLFWQEWEQEPGQNKLLEALVLGTAAGRVGTRQNCLQDESQERTLSPVSGVWL

SEQ ID NO: 3747 - protein, 33 aa, Homo sapiens
MVPRSVAFVKTLALLELGFALAVMQGCAEPISM

SEQ ID NO: 3748 - protein, 51 aa, Homo sapiens
AVVPTWCSTVLLTFVPTARLVAGLEDVQVYDGEDAVFSLDLSTIIQGTWFP

SEQ ID NO: 3749 - protein, 10 aa, Homo sapiens
MHLITVLLNV

SEQ ID NO: 3750 - protein, 25 aa, Homo sapiens
MFCLSFPISGAYLLIPAYFLEVVGK

SEQ ID NO: 3751 - protein, 97 aa, Homo sapiens
MEVVVTVTPKTCPLSSLLLFLLYFLVIGSVIHLTAGFRILVLGLVFLFFPYPPYPNCHQVLLHALMISHLSYPSSFQIGPSDFNLGHSHYLLYYGKI

SEQ ID NO: 3752 - protein, 334 aa, Homo sapiens
  SITE (290): Xaa equals any of the naturally occurring L-amino acids
  SITE (316): Xaa equals any of the naturally occurring L-amino acids
  SITE (321): Xaa equals any of the naturally occurring L-amino acids
MLFGSIFRCLDPALTIAASLAFKSPFVSPWDKKEEANQKKLEFAFANSDYLALLQAYKGWQLSTKEGVRASYNYCRQNFLSGRVLQEMASLKRQFTELLSDIGFAREGLRAREIEKRAQGGDGVLDATGEEANSNAENPKLISAMLCAALYPNVVQVKSPEGKFQKTSTGAVRMQPKSAELKFVTKNDGYVHIHPSSVNYQVRHFDSPYLLYHEKIKTSRVFIRDCSMVSVYPLVLFGGGQVNVQLQRGEFVVSLDDGWIRFVAASHQVAELVKELRCELDQLLQDKIKXPSIDLCTCPRGSRIISTIVKLVTTQXKAVLXSACYSPASSSPGK

SEQ ID NO: 3753 - protein, 33 aa, Homo sapiens
MGLLWNLIATYFCFPLDAASTHVDYEVLTHPRS

SEQ ID NO: 3754 - protein, 50 aa, Homo sapiens [sequence omitted]

SEQ ID NO: 3755 - protein, 38 aa, Homo sapiens
MYLKYCYVILGYLFIFEIFVYIAFLNLANNMCKGINQK

SEQ ID NO: 3756 - protein, 5 aa, Homo sapiens
IVGFN

SEQ ID NO: 3757 - protein, 30 aa, Homo sapiens
MLQFSCLSISHVLILLITFFACVVLAPFQK

SEQ ID NO: 3758 - protein, 29 aa, Homo sapiens
MFFSCLFLFGLYSGCLFLFVKRKQCTEKQ

SEQ ID NO: 3759 - protein, 45 aa, Homo sapiens
MELNIAWMTEKLWKEMEDFLNFSLVLFVMKLKLPAPEKVFQYLLC

SEQ ID NO: 3760 - protein, 38 aa, Homo sapiens
  SITE (25): Xaa equals any of the naturally occurring L-amino acids
MQTCLLWNLKTLLVVRLLPGIPGLXGFYFDSKQKQMLC

SEQ ID NO: 3761 - protein, 38 aa, Homo sapiens
MVCSILSFSILPFWEDFGISFLFFLFFLREWQIVFSQV

SEQ ID NO: 3762 - protein, 52 aa, Homo sapiens
MCVVNILWFSAFTSMRVASDPARLTGLPKPSLASSTYISLCCSTSKQTKIGV

SEQ ID NO: 3763 - protein, 31 aa, Homo sapiens
MFMLAILLTFFHPFLVYRECRTWKESPSAIA

SEQ ID NO: 3764 - protein, 15 aa, Homo sapiens
YIFVWISSVYVQYFV

SEQ ID NO: 3765 - protein, 40 aa, Homo sapiens [sequence omitted]

SEQ ID NO: 3766 - protein, 45 aa, Homo sapiens
GMAVLVEKSVVLVIWLGPVAQAGSNWFAVSSLQEYLKQGDSSSLL

SEQ ID NO: 3767 - protein, 46 aa, Homo sapiens [sequence omitted]

SEQ ID NO: 3768 - protein, 31 aa, Homo sapiens
MTFVIYYTHWFLLIIVLSDFLFSTMVPLAEK

SEQ ID NO: 3769 - protein, 2 aa, Homo sapiens
KW

SEQ ID NO: 3770 - protein, 33 aa, Homo sapiens
MEKLDWAYSQHSVICKCISLLCRVFLLGVNFDS

SEQ ID NO: 3771 - protein, 32 aa, Homo sapiens
MLTGTLFPGFHVRLWALSPAQAQECLVGGEWS

SEQ ID NO: 3772 - protein, 20 aa, Homo sapiens
MCGCTTFFCDYMGSFERIYL

SEQ ID NO: 3773 - protein, 46 aa, Homo sapiens
MIFLGLHTFALFSEPCPLNVTLLPFSTVCVPTVQGLPGTAHRLMAC

SEQ ID NO: 3774 - protein, 37 aa, Homo sapiens
MYCKQSCVLILFSLFECIIILIIPKTLTTQGTAVQYY

SEQ ID NO: 3775 - protein, 28 aa, Homo sapiens
MHLPQLPLQSHHYCRLALRVSFQVFWHV

SEQ ID NO: 3776 - protein, 32 aa, Homo sapiens
KMNLFVLVGAISFIFRTTECAFINRMKAHAED

SEQ ID NO: 3777 - protein, 41 aa, Homo sapiens
MGHLKSCMNHNLLWYLCTCLILYSLFQCGICAPLYLLRSAE

SEQ ID NO: 3778 - protein, 82 aa, Homo sapiens
LPVEEPNPAKRLLFLLLTIVFCQILMAEEGVPAPLPPEDAPNAASLAPTPVSPVLEPFNLTSEPSDYALDLSTFLQQHPAAF

SEQ ID NO: 3779 - protein, 39 aa, Homo sapiens
MALLLHLTGLKCWGHLWLLCITVHTQVEPVCSFPFDMFF

SEQ ID NO: 3780 - protein, 45 aa, Homo sapiens
MMLLLLWPGLQWKCTGTPNVVNALSSICSGILRVGLWFHALAVCK

SEQ ID NO: 3781 - protein, 1 aa, Homo sapiens
S

SEQ ID NO: 3782 - protein, 30 aa, Homo sapiens
MRKYLMGTVYTFLVLVAGKAWTSPLRNISV

SEQ ID NO: 3783 - protein, 47 aa, Homo sapiens
MHETCFYFAALVLLVLLRKEKEGREFMVRRFLVRRFIVRRSRLGHKK

SEQ ID NO: 3784 - protein, 10 aa, Homo sapiens
HAGRYCVIRA

SEQ ID NO: 3785 - protein, 41 aa, Homo sapiens
LCTLSTILCLFSICLFLPISLPLRKKIGVTFVKVILIVNHL

SEQ ID NO: 3786 - protein, 11 aa, Homo sapiens
LLFASFLCKIL

SEQ ID NO: 3787 - protein, 63 aa, Homo sapiens
MFISWFILFRLYPLSSPFFSQNVLKQISDILSPYYFIQKYFSIPERYSSSKKKTTIPLSHLKS

SEQ ID NO: 3788 - protein, 59 aa, Homo sapiens
MHRWKAFFPGPYPSLHNTPVTPHHGLLSDPHGIPVALCSHTAFLICPPCLSLTHILFQG

SEQ ID NO: 3789 - protein, 10 aa, Homo sapiens
MGCWLLPCFL

SEQ ID NO: 3790 - protein, 39 aa, Homo sapiens
MPAHLCLLPLLLCPSYSQNLYLLSNLHFVLVPLPFPIKE

SEQ ID NO: 3791 - protein, 34 aa, Homo sapiens [sequence omitted]

SEQ ID NO: 3792 - protein, 31 aa, Homo sapiens
MTPGSRVMGTCWGFCFFFFTGWLDPQWQKDP

SEQ ID NO: 3793 - protein, 46 aa, Homo sapiens
MKLLRSAAKLMVLISTQTSYAFGEQCTHLTLFLINSNSGKIPLTYF

SEQ ID NO: 3794 - protein, 36 aa, Homo sapiens
MTGTPAWAHLLLLLLLGSAPQTRLWPPSQCPVTSPE

SEQ ID NO: 3795 - protein, 55 aa, Homo sapiens
MGGILLALIEGVGILLTRYTAQQFRNAPPFLEDPSQLPPKDGTPAPGYPSYQQYH

SEQ ID NO: 3796 - protein, 7 aa, Homo sapiens
MPIWAFV

SEQ ID NO: 3797 - protein, 37 aa, Homo sapiens [sequence omitted]

SEQ ID NO: 3798 - protein, 113 aa, Homo sapiens
SACDTGLAVLLTVFCACVLPPFPPAAAETRPSFHTQISCPVLTPPCHHQPCLEPPALWQQNQTFLWAFKMVLCPPVRSCVLSPKGHAKDWLWEALITNPSTSSLPQAGSNKCI

SEQ ID NO: 3799 - protein, 38 aa, Homo sapiens
MQLRGLSLNPRLLLTLGSLCLGSSAPGFGRQQFPKNKM

SEQ ID NO: 3800 - protein, 162 aa, Homo sapiens
MLVMKWEESIIWHHLVLCANSGLSILLILPCKVNNYYPHFAVEKTEYSDTTLTFLGSKKLSVSLGFELQVNLILKHVLLSIRTVVLLTGHGAHACNSSTLGSQGWQITWTQEFETSPGSMAKPHLNRKYLKVRQVWWHAPVVPATREAEVKGLLEPARWRLH

SEQ ID NO: 3801 - protein, 18 aa, Homo sapiens
MTCLLSGCLFCSREGSAV

SEQ ID NO: 3802 - protein, 30 aa, Homo sapiens
MIFLLIVNYLSFIDYGRDLQNGIHVQWCGE

SEQ ID NO: 3803 - protein, 71 aa, Homo sapiens
ESAPPWLPICPTRSLGLLVQLLALAGSCSAGPRALGQASGVVRTTKPLLSPSTPLDLGPPEPPAGWAYTSS

SEQ ID NO: 3804 - protein, 183 aa, Homo sapiens
MTKSSAVLFILIFSLIFKLEELRAALVLVVLLIAGGLFMFTYKSTQFNVEGFAWCWGPRSSVAFAGPSPRCSCRRLNSASRIPSTPCSTCSHSCSWGSSLSLLYLKVSICPHLRKSSVSRTQGCSCGYLGASSLAGFSPLVWASLSSSWSPEPPASLSPLPAFLRKSALCCWQLICWAIRSAS

SEQ ID NO: 3805 - protein, 24 aa, Homo sapiens
CIECIVLAQFSGSRKKIQARTAGL

SEQ ID NO: 3806 - protein, 38 aa, Homo sapiens
MSFPYWLFYLLLFSLPIRDILGGDGKGWAKEQTLGLGP

SEQ ID NO: 3807 - protein, 35 aa, Homo sapiens
SIYLFLLRAQRLFPNILCLLLFPDLLTGFFLPMNF

SEQ ID NO: 3808 - protein, 15 aa, Homo sapiens
FLFINVQLPLCLASR

SEQ ID NO: 3809 - protein, 2 aa, Homo sapiens
KL

SEQ ID NO: 3810 - protein, 23 aa, Homo sapiens
MFSHNGKGKAALWGLFLLVHESH

SEQ ID NO: 3811 - protein, 33 aa, Homo sapiens
MGPSFFFLFSVAFSIFRVHLALPPNLIKNVSDL

SEQ ID NO: 3812 - protein, 18 aa, Homo sapiens
EKVTRFHNAFLFPNHWYS

SEQ ID NO: 3813 - protein, 20 aa, Homo sapiens
MWWPSWMTSSTGPAGVLCGP

SEQ ID NO: 3814 - protein, 13 aa, Homo sapiens
EFRAGFLLLLHGM

SEQ ID NO: 3815 - protein, 4 aa, Homo sapiens
MNSP

SEQ ID NO: 3816 - protein, 39 aa, Homo sapiens
MLSFRIISSFYIILVFCSYVLRAHTLLGSVSPREKWYEK

SEQ ID NO: 3817 - protein, 8 aa, Homo sapiens
MLFFKLAI

SEQ ID NO: 3818 - protein, 40 aa, Homo sapiens
MLIKKLWFLQDFVFRDSGKEHINQKEELTSILLVLKITDY

SEQ ID NO: 3819 - protein, 62 aa, Homo sapiens
MAMYCGLHGLTVLTKMLPGCMSAWKKLSRNTWVKKISTPRSASIFMSVRWSARVARSVTCTP

SEQ ID NO: 3820 - protein, 36 aa, Homo sapiens
MFNSLLAFFLILWGCITSLKDIVIISYKVKIKKDCV

SEQ ID NO: 3821 - protein, 33 aa, Homo sapiens
  SITE (8): Xaa equals any of the naturally occurring L-amino acids
MALILLLXVLMEVTLEGKKKMDGVHMEEMVQKT

SEQ ID NO: 3822 - protein, 26 aa, Homo sapiens
MLVLTFVSVYHLNVFMYLMVFCGCFS

SEQ ID NO: 3823 - protein, 9 aa, Homo sapiens
MVSSPQGLC

SEQ ID NO: 3824 - protein, 17 aa, Homo sapiens
YCIFTFLSTADVTIYGQ

SEQ ID NO: 3825 - protein, 25 aa, Homo sapiens
KLIWQVLLVFLIIIILNPKYSNFLN

SEQ ID NO: 3826 - protein, 18 aa, Homo sapiens
MTGLHMTLLISFIYVSTF

SEQ ID NO: 3827 - protein, 45 aa, Homo sapiens [sequence omitted]

SEQ ID NO: 3828 - protein, 7 aa, Homo sapiens
MTTLQGG

SEQ ID NO: 3829 - protein, 14 aa, Homo sapiens
KPLFLHLPLLTLQA

SEQ ID NO: 3830 - protein, 59 aa, Homo sapiens
MGLSVLLPLCLLGPGRFTSGQKPLDTPGLGAAVLSVRKAGLKMRSHLTPSVCTVPSPGS

SEQ ID NO: 3831 - protein, 34 aa, Homo sapiens
  SITE (24): Xaa equals any of the naturally occurring L-amino acids
MLTSLICYAIPCKFLNFAVPWFCXITPGSVTMAT

SEQ ID NO: 3832 - protein, 34 aa, Homo sapiens; identical to SEQ ID NO: 3831
  SITE (24): Xaa equals any of the naturally occurring L-amino acids

SEQ ID NO: 3833 - protein, 38 aa, Homo sapiens
MRMIIISYIKICGRFTVMITLLVPTLSLNLHDPVASKN

SEQ ID NO: 3834 - protein, 31 aa, Homo sapiens
MGNLYPKLGLKIIFIFVFQQTWVLCPAMDQK

SEQ ID NO: 3835 - protein, 77 aa, Homo sapiens
VTQSKWLIFYIVVYFVLPSSLRNKARIFSLFDIYSETKGLLDLMIFLQLSEGAFSTIQVILIHTKVENHCTRSLCVF

SEQ ID NO: 3836 - protein, 13 aa, Homo sapiens
MLSVATNRIYNSN

SEQ ID NO: 3837 - protein, 67 aa, Homo sapiens [sequence omitted]

SEQ ID NO: 3838 - protein, 18 aa, Homo sapiens
MCESFPEGFCPCFHMSHN

SEQ ID NO: 3839 - protein, 21 aa, Homo sapiens
MFKVRGFLSICLVFCWQVTCR

SEQ ID NO: 3840 - protein, 47 aa, Homo sapiens
  SITE (17): Xaa equals any of the naturally occurring L-amino acids
MFKVRGFLSICLVFCWXGHMQVIGYGKGKMPRLLLGWSPSPKFKPPE

SEQ ID NO: 3841 - protein, 35 aa, Homo sapiens
MSLPLYVSLSDMFYAKLSDFKFKISEIKCPSLHIV

SEQ ID NO: 3842 - protein, 19 aa, Homo sapiens
MLVLVVFCWAVLVYFHPSL

SEQ ID NO: 3843 - protein, 29 aa, Homo sapiens
MMCFLFLNEICLASCMENEFCWSIVETET

SEQ ID NO: 3844 - protein, 36 aa, Homo sapiens
MKMLICSLTLLVCLSPRVGRRSRYYHSKGTESVSTL

SEQ ID NO: 3845 - protein, 18 aa, Homo sapiens
MNMICLSYRLALTCFFFQ

SEQ ID NO: 3846 - protein, 348 aa, Homo sapiens
GTLLGKALAAVSLSLALASVTIRSSRCRGIQAFRNSFSSSWFHLNTNVMSGSNGSKENSHNKARTSPYPGSKVERSQVPNEKVGWLVEWQDYKPVEYTAVSVLAGPRWADPQISESNFSPKFNEKDGHVERKSKNGLYEIENGRPRNPAGRTGLVGRGLLGRWGPNHAADPIITRWKRDSSGNKIMHPVSGKHILQFVAIKRKDCGEWAIPGGMVDPGEKISATLKREFGEEALNSLQKTSAEKREIEEKLHKLFSQDHLVIYKGYVDDPRNTDNAWMETEAVNYHDETGEIMDNLMLEAGDDAGKVKWVDINDKLKLYASHSQFIKLVAEKRDAHWSEDSEADCHAL

SEQ ID NO: 3847 - protein, 34 aa, Homo sapiens
MTITLVAFHLILPSFIIWFTWICHPINSEVYQQN

SEQ ID NO: 3848 - protein, 29 aa, Homo sapiens
FFFFGFFVFFKHQSALSECRVLIGGMMMV

SEQ ID NO: 3849 - protein, 58 aa, Homo sapiens
MQGPGLSAAGGCLWAWLSLGTPFLSVATLAVSGAALDNFGHRNSGGGFWSSEVATQQV

SEQ ID NO: 3850 - protein, 82 aa, Homo sapiens
  SITE (3): Xaa equals any of the naturally occurring L-amino acids
  SITE (23): Xaa equals any of the naturally occurring L-amino acids
  SITE (72): Xaa equals any of the naturally occurring L-amino acids
CSXSYLWQVDYIGPLHYGRDRIXSYWNILTQDMDLPFLHAILLPRVPSMDLQNCLVDCHGITHSIAFDQGTXSTDRNAAMHS

SEQ ID NO: 3851 - protein, 123 aa, Homo sapiens
VARLHRLLHTFLLTFCCLLMAEEAAVFAKYLAHGLPAGAPLRLVFLLNVLLLGLWNFCCSVPSSISTSTLTRWWAPQWAPLPGTSPMAAGIISPGLQGAQAMGSSPVPTPAASITERNKNHRA

SEQ ID NO: 3852 - protein, 72 aa, Homo sapiens
  SITE (38): Xaa equals any of the naturally occurring L-amino acids
MSPWDLPRRGLLLLVLPFLLSPRPLVYLLLPALPQLQXLQAHQQTVLSSPLKLQTKPTLQAKLHLGLEMVIS

SEQ ID NO: 3853 - protein, 13 aa, Homo sapiens
YTHTYAHMLWVLP

SEQ ID NO: 3854 - protein, 37 aa, Homo sapiens
MLIRVIIFKSFSQSCISILALSKLVELFSVLLDILHS

SEQ ID NO: 3855 - protein, 37 aa, Homo sapiens
MDIKILPMCFVFYCCSICYCTCDGTCAYIALKQISRS

SEQ ID NO: 3856 - protein, 31 aa, Homo sapiens
MYLFILLYLCFYFSSSENGFLVSEVYLYLKF

SEQ ID NO: 3857 - protein, 20 aa, Homo sapiens
MWPLLFAICVSVAYGLSCIR

SEQ ID NO: 3858 - protein, 20 aa, Homo sapiens
GKCLINLVIGWVKYMGEFYM

SEQ ID NO: 3859 - protein, 20 aa, Homo sapiens
GKCLINLVIGWVKYMGEFYM

SEQ ID NO: 3860 - protein, 82 aa, Homo sapiens
MSCSHTCLYLKPSVCPVVWGEVMDSARWTCCGWMFPACAGPEWTGATSQHVRENHCHTIPMDFVLFLKKKKFFSVNMNFFSM

SEQ ID NO: 3861 - protein, 156 aa, Homo sapiens
MLTDMMKGNVTNVLPMILIGGWINMTFSGFVTTKVPFPLTLRFKPMLQQGIELLTLDASWVSSASWYFLNVFGLRSIYSLILGQDNAADQSRMMQEQMTGAAMAMPADTNKAFKTEWEALELTDHQWALDDVEEELMAKDLHFEGMFKKELQTSIF

SEQ ID NO: 3862 - protein, 31 aa, Homo sapiens [sequence omitted]

SEQ ID NO: 3863 - protein, 17 aa, Homo sapiens
MILVGLWLIQWLLLKYK

SEQ ID NO: 3864 - protein, 4 aa, Homo sapiens
MRSE

SEQ ID NO: 3865 - protein, 126 aa, Homo sapiens [sequence omitted]

SEQ ID NO: 3866 - protein, 39 aa, Homo sapiens
MFSFYSHNPLKPCLVLLLFASAVQDVAPFLLFEHGLVTR

SEQ ID NO: 3867 - protein, 24 aa, Homo sapiens
MCNLYLILYFVIHTNMSRHCDICL

SEQ ID NO: 3868 - protein, 23 aa, Homo sapiens
MPSLHTFFLLLPFVFMPVAFTLH

SEQ ID NO: 3869 - protein, 38 aa, Homo sapiens
  SITE (14): Xaa equals any of the naturally occurring L-amino acids
  SITE (21): Xaa equals any of the naturally occurring L-amino acids
MAKCITITLFTVIXFAENISXSWNCEIKLKILLVKMTN

SEQ ID NO: 3870 - protein, 38 aa, Homo sapiens
MAKCITITLFTVICFAENISSSWNCEIKLKILLVKMTN

SEQ ID NO: 3871 - protein, 18 aa, Homo sapiens
CLLLSKLLHLQPLAVADS

SEQ ID NO: 3872 - protein, 40 aa, Homo sapiens
MFCTLWIGILVRKSIASRKRLMSQLAGETVPSFWVAVLVK

SEQ ID NO: 3873 - protein, 35 aa, Homo sapiens
MVILLAHPCIHQPGISLNLFASEFLLTFQYIGIID

SEQ ID NO: 3874 - protein, 11 aa, Homo sapiens
MYFSIEGGVFQ

SEQ ID NO: 3875 - protein, 24 aa, Homo sapiens
VCVTVSNPISCLSVAPSHLLDQAA

SEQ ID NO: 3876 - protein, 26 aa, Homo sapiens
MSTIMFSLWTICVGLPPARSLLYPHQ

SEQ ID NO: 3877 - protein, 37 aa, Homo sapiens
MQILHWQWLLCVKYFPFGLIFIHIVSLNKGETTYRRN

SEQ ID NO: 3878 - protein, 39 aa, Homo sapiens
  SITE (16): Xaa equals any of the naturally occurring L-amino acids
MTLAFVVLALWPNGRXHVLVHMCWLLFLKSWQCQHMGGI

SEQ ID NO: 3879 - protein, 1 aa, Homo sapiens
L

SEQ ID NO: 3880 - protein, 148 aa, Homo sapiens
MSPRWALVTLLGFSHRKQRCLPLPLLHILPLPSRAGFWVHLSTGRCSQGVGAGGGVCGQVLGGTRKSRGVAHADQAHVAHGAELPRTAHDSATFSPFQPRRDVTLELLWHFCQASPAPIALRSLLFVRDLQRLTFLLFSHHSIVILRN

SEQ ID NO: 3881 - protein, 7 aa, Homo sapiens
MHLVTVC

SEQ ID NO: 3882 - protein, 10 aa, Homo sapiens
MSLCGSRDLC

SEQ ID NO: 3883 - protein, 8 aa, Homo sapiens
MWILLYLI

SEQ ID NO: 3884 - protein, 15 aa, Homo sapiens
MMFLLIFVWYLQPYP

SEQ ID NO: 3885 - protein, 18 aa, Homo sapiens
MQLWLKSGLLLSFILILP

SEQ ID NO: 3886 - protein, 7 aa, Homo sapiens
LGFLLLT

SEQ ID NO: 3887 - protein, 77 aa, Homo sapiens
MIRMLVLSLLLTFYLLSIWSIAFFLACQAARIFRDHLVQSLIRCLHPHTYVPSKGSAFDIVFILHLFSLSRDSERAE

SEQ ID NO: 3888 - protein, 37 aa, Homo sapiens
MSLSLIYFSVSFTTFGVKSSHDLYIPRLLLLKILYIL

SEQ ID NO: 3889 - protein, 62 aa, Homo sapiens
RGRGRLLGLSSFLCIILGLAWTAPASESCGPHPLAAEPSTVILGAIFPCRTGSLSPAPTFGL

SEQ ID NO: 3890 - protein, 62 aa, Homo sapiens; identical to SEQ ID NO: 3889

SEQ ID NO: 3891 - protein, 42 aa, Homo sapiens
MAAPSFLTSFLLPSSLPQVLSRETPFPAISSGRLGRCWADTS

SEQ ID NO: 3892 - protein, 48 aa, Homo sapiens
  SITE (46): Xaa equals any of the naturally occurring L-amino acids
MVAVWWFSLVMLFESFLLCVSALPVSFIFSYIFMMVDIVLLLPNVXLP

SEQ ID NO: 3893 - protein, 11 aa, Homo sapiens
MLLGISAVGLF

SEQ ID NO: 3894 - protein, 40 aa, Homo sapiens
GILLVQTYLGCCWGRHLGFSVSCIHRGRPFQIQEHWIRES

SEQ ID NO: 3895 - protein, 36 aa, Homo sapiens
MPSPLLSSVNTNTFPTPLCSRRPVAGRFSVPVVWIL

SEQ ID NO: 3896 - protein, 28 aa, Homo sapiens
MNDPPTAPHGLFLFLWLFSLRSGGFTRI

SEQ ID NO: 3897 - protein, 46 aa, Homo sapiens
VYVHTLCFVCVWFGAACVCVCVCVCDICYACVCQCVLGVPAPLSWR

SEQ ID NO: 3898 - protein, 119 aa, Homo sapiens
  SITE (51): Xaa equals any of the naturally occurring L-amino acids
  SITE (59): Xaa equals any of the naturally occurring L-amino acids
  SITE (68): Xaa equals any of the naturally occurring L-amino acids
MGSALGLAGISGSLGSGARLRWARSRTQGAGLWGVLAAGAVSGESQSCRAXKEREGAVXAMPPVGQQXNRQALPAHPPTHLGVHPPHWAWPRQVSLPGPGPAQPASLFLLPPHSPGTGL

SEQ ID NO: 3899 - protein, 65 aa, Homo sapiens
MWGRRQCALWMVFTSTAHTTLGSRPSTKQESARTARPWSSKRLRWPGLLSTLARRTRTSSSPMTT

SEQ ID NO: 3900 - protein, 4 aa, Homo sapiens
MFLI

SEQ ID NO: 3901 - protein, 17 aa, Homo sapiens
MFLFCIFSSPSPLTQRI

SEQ ID NO: 3902 - protein, 37 aa, Homo sapiens
MLIGLLSLAPDSACSWLPVLTDHICHCHRISSASASA

SEQ ID NO: 3903 - protein, 55 aa, Homo sapiens
MAGTRPTGKRCWSIWVTLLITRCPFDLAGPASLLMRSLCWPPCSTRSLPSVPAVS

SEQ ID NO: 3904 - protein, 33 aa, Homo sapiens
MARGGTWWSLLSFWTWGCQTRAHPHTRPGPLRP

SEQ ID NO: 3905 - protein, 8 aa, Homo sapiens
MHYLQTGG

SEQ ID NO: 3906 - protein, 8 aa, Homo sapiens
MHYLQTGG

SEQ ID NO: 3907 - protein, 24 aa, Homo sapiens
MVSHGCHVPLFALFMVLPSSQGLP

SEQ ID NO: 3908 - protein, 36 aa, Homo sapiens
MPLFGGNLGYAWAWFTPITWVAVLAHLIVSSIHPGK

SEQ ID NO: 3909 - protein, 41 aa, Homo sapiens
MARVSARWRSLLAWWVSSCPISLEGRAGSHEHGEYPWMLHS

SEQ ID NO: 3910 - protein, 33 aa, Homo sapiens
  SITE (25): Xaa equals any of the naturally occurring L-amino acids
FLFWGVMKILGCAPIFSFLRLSLIXDRHLGVVF

SEQ ID NO: 3911 - protein, 123 aa, Homo sapiens
MAFLSFCCCAFALYYWSSAFSLSIVFFFLYRIYTPKFFHLASSHNLTSPSGSCPVFLLLFILSLKGRVYSHYLHFSTCHLAFHPLQPEFDPQNSTETTLSKATNYCLIVKVNGLFFIFIIYGI

SEQ ID NO: 3912 - protein, 37 aa, Homo sapiens
MNIVWFVMSHMCFKMALCLGLPYVNGSCVCLLFKPWE

SEQ ID NO: 3913 - protein, 16 aa, Homo sapiens
MFLDFLFCPVGLFVSL

SEQ ID NO: 3914 - protein, 182 aa, Homo sapiens
MTLAAYKEKMKELPLVSLFCSCFLADPLNKSSYKYEADTVDLNWCVISDMEVIELNKCTSGQSFEVILKPPSFDGVPEFNASLPRRRDPSLEEIQKKLEAAEERRKYQEAELLKHLAEKREHEREVIQKAIEETTTSSRWLRKNWPRRWNPTRRTGRPTSPPCWNGCKRRTSTPRRCGKTRS

SEQ ID NO: 3915 - protein, 120 aa, Homo sapiens
ATALPSMSSTFWAFMILASLLIAYCSQLAAGTCEIVTLDRDSSQPRRTIARQTARCACRKGQIAGTTRARPACVDARIIKTKQWCDMLPCLEGEGCDLLINRSGWTCTQPGGRIKTTTVS

SEQ ID NO: 3916 - protein, 36 aa, Homo sapiens
MRNALHSMNINFHLPFFLVFILLFILLLIHDSYTYL

SEQ ID NO: 3917 - protein, 15 aa, Homo sapiens
MISDTEPFFLWLLAA

SEQ ID NO: 3918 - protein, 48 aa, Homo sapiens
GTPSLLPYSCSRFSGLNQVNRGPEPPLCLLEIPKTEMCSRSRSKTLSL

SEQ ID NO: 3919 - protein, 37 aa, Homo sapiens
MRSLGSTLVSDTWDRGAFATLVVVTPPHLPASFTDSK

SEQ ID NO: 3920 - protein, 40 aa, Homo sapiens
MCKMFNLPFLLLVSVALWCKQLKTLNVYTIRPRRQMKYFF

SEQ ID NO: 3921 - protein, 36 aa, Homo sapiens
MTNLVISFTLRFSSFPVLPFCLLLCNIAFGLNNTFS

SEQ ID NO: 3922 - protein, 39 aa, Homo sapiens
MTRPTIVSSCLWAVRQLVGTRSNPRFFLQYSGYNLSWLL

SEQ ID NO: 3923 - protein, 182 aa, Homo sapiens
MAALAHEAVGTRDLLAAGCCCLARWGSMEELGLPPRPAPAARMLGSHGGTRPGAPASPSGWCGQLFPASQCPGGSCLADSAWSPAGFRKTQLHVWDSSPALGCGVSVHLRAGGPTHRLPLQVHPRAWARWAPGTWPADAATSDQCCVEEPRAAPGKPGFNSTRKRNLLCFVRACSFSSFLSL

SEQ ID NO: 3924 - protein, 142 aa, Homo sapiens
  SITE (2): Xaa equals any of the naturally occurring L-amino acids
MXALAHEAVGTRDLLAAGCCCLARWGSMEELGLPPRPAPAARMLGSHGGTRPGAPASPSGWCGQLFPASQCPGGSCLADSAWSPAGFRKTQLHVWDSSPALGCGVSVHLRAGGPTHRLPLQVHPRAWGPLGTWHLACRCCYE

SEQ ID NO: 3925 - protein, 35 aa, Homo sapiens
MLRVFFFSLVVGTSTARTISYSSLHPWHMHENIST

SEQ ID NO: 3926 - protein, 57 aa, Homo sapiens
MYWCTYCMEAWLSSQQLVLHRNMRPCIFQMFSLSRLFTMESTTSCTHSCCSSAMASP

SEQ ID NO: 3927 - protein, 27 aa, Homo sapiens
MPASLRNPTVLHMLSNTIFSYPLSLPC

SEQ ID NO: 3928 - protein, 40 aa, Homo sapiens
GCHHLFLYIFCNILKLLPSLIIISVCVCKDNQAFKFIKHV

SEQ ID NO: 3929 - protein, 244 aa, Homo sapiens
  SITE (78): Xaa equals any of the naturally occurring L-amino acids
  SITE (222): Xaa equals any of the naturally occurring L-amino acids
MHLALYCFASSQLSTALSLLYRARYLMLLVFGEDHPEMALLDNNIGLVLHGVMEYDLSLRFLENALAVSTKYHGPKAXKVALSHHLVARVYESKAEFRSALQHEKEGYTIYKTQLGEDHEKTKESSEYLKCLTQQAVALQRTMNEIYRNGSSANIPPLKFTAPSMASVLEQLNVINGILFIPLSQKDLENLKAEVARRHQLQEASRNRDRAEEPMATEPAPXGAPGDLGSQPPAAKDPSPSVQG

SEQ ID NO: 3930 - protein, 48 aa, Homo sapiens
HLQHCVSCGCAVTGIKSSAFNAKGSEIFLKLISCPMQVFSTTCITSTL

SEQ ID NO: 3931 - protein, 71 aa, Homo sapiens [sequence omitted]

SEQ ID NO: 3932 - protein, 44 aa, Homo sapiens
DLQIQWPILLSLSCEGVFQVLKQSKNHLGPSLRKHFSGQVGFRL

SEQ ID NO: 3933 - protein, 14 aa, Homo sapiens
GFYTFLPSLPGALY

SEQ ID NO: 3934 - protein, 139 aa, Homo sapiens
MKKIVDQNTKLAPETKAVIHWIMDIPFVLSANLHGGDLVANYPYDETRSGSAHEYSSSPDDAIFQSLARAYSSFNPAMSDPNRPPCRKNDDDSSFVDGTTNGVLGTAYLEGCKTSITLAATVLRSPWSLAVRSSHLKRL

SEQ ID NO: 3935 - protein, 2 aa, Homo sapiens
MY

SEQ ID NO: 3936 - protein, 9 aa, Homo sapiens
MRFLFIFCF

SEQ ID NO: 3937 - protein, 12 aa, Homo sapiens
MERVRTSMECFC

SEQ ID NO: 3938 - protein, 48 aa, Homo sapiens
MLVILLDMFFVVVVTWNFCILNKFGDQIQKKKKKKKKKKKKKKKKKKK

SEQ ID NO: 3939 - protein, 31 aa, Homo sapiens
MVIWSTYDTLAVLIFGVLALVLSHLHVWVFL

SEQ ID NO: 3940 - protein, 48 aa, Homo sapiens
ELSCWQDLLELARQLWLWLLLRSWVVRSPSAQWWGVKFTQLRSRRQRC

SEQ ID NO: 3941 - protein, 59 aa, Homo sapiens [sequence omitted]

SEQ ID NO: 3942 - protein, 1 aa, Homo sapiens
F

SEQ ID NO: 3943 - protein, 44 aa, Homo sapiens
MSGLSGAPWGTWALPLAHLSLLSRTCLSSSPLGFRLFSRHLRHL

SEQ ID NO: 3944 - protein, 38 aa, Homo sapiens
MLSLPAPLRVNRGLWQLCTGAGLWLLQGALPVTRSWAV

SEQ ID NO: 3945 - protein, 40 aa, Homo sapiens
MAGVSTSPGPFLRYLPACLPELTCRPRKMLTEVLLEVAPA

SEQ ID NO: 3946 - protein, 133 aa, Homo sapiens
MFTDLSSSWCMTMTPVGSMTSSASSPALSRRCRKGRQTLGRRCSGTVSTQVSGQEEELQELRDGSAGPVHGGEGAHLPGLHHGWLPDQLHGGHRLHRLQWGPEEQPVPALPQSPTAQPLPAGPACSGRHLPGL

SEQ ID NO: 3947 - protein, 8 aa, Homo sapiens
WAFSAWLL

SEQ ID NO: 3948 - protein, 9 aa, Homo sapiens
IFLILLICV

SEQ ID NO: 3949 - protein, 29 aa, Homo sapiens
RVFLNHELYHVTFLLVKLSVALHCQQSPA

SEQ ID NO: 3950 - protein, 90 aa, Homo sapiens
MADRAPRQPTSLGSSPQRCGSPPSAPPPPPDRGERIEDCLAPLCPPVVGGRGGCALSRFLPVDLSLLRSSRTAAVELVAGGVCRSPSQEN

SEQ ID NO: 3951 - protein, 42 aa, Homo sapiens
IIVRVGFALSCSVSCPFFALLSCDAFHHIMTQQEGPHKVPAP

SEQ ID NO: 3952 - protein, 42 aa, Homo sapiens
MKIFMYVPIILFRSQCLCLSLTEIIELLSSSKLNKTLELKAS

SEQ ID NO: 3953 - protein, 6 aa, Homo sapiens
GVSLHQ

SEQ ID NO: 3954 - protein, 66 aa, Homo sapiens
MGSRLAPLLSACLFVSVILGRMVILKNPGVLGQRQAGPSPGAPGLPSPSVRAPLGHKCSERSPSAT

SEQ ID NO: 3955 - protein, 87 aa, Homo sapiens [sequence omitted]

SEQ ID NO: 3956 - protein, 22 aa, Homo sapiens
MLMPPPPPARLFFLYFVLFLLG

SEQ ID NO: 3957 - protein, 46 aa, Homo sapiens
MRLGISELSFLLGALGYLSLPRVGPLEPFLPWVGAVSGCWEGLCWP

SEQ ID NO: 3958 - protein, 51 aa, Homo sapiens
MTTSQAISCLAHWACAWETACCWMARRRAHCGSVGPRSLPAAVGGRGAGRT

SEQ ID NO: 3959 - protein, 66 aa, Homo sapiens [sequence omitted]

SEQ ID NO: 3960 - protein, 66 aa, Homo sapiens [sequence omitted]

SEQ ID NO: 3961 - protein, 66 aa, Homo sapiens [sequence omitted]

SEQ ID NO: 3962 - protein, 22 aa, Homo sapiens
MVCCWRGCCWSWSIVLLWLGTV

SEQ ID NO: 3963 - protein, 60 aa, Homo sapiens
MKNSLAAQQSFSACSQIGEVSTCYSLCRRPSFLLCFPSLVFPPAGSWAGVPGCLPESRLH

SEQ ID NO: 3964 - protein, 60 aa, Homo sapiens; identical to SEQ ID NO: 3963

SEQ ID NO: 3965 - protein, 76 aa, Homo sapiens
VGHHSRPWTSPNLGTALFPNVSILLTGASSAQPWEPIQGLVRTGLPGVGVWGVPSGVIDSPTAPALTGPQVAAMVN

SEQ ID NO: 3966 - protein, 32 aa, Homo sapiens
WALALATHFLQNLGFGKNMASRQSKLSRQWGW

SEQ ID NO: 3967 - protein, 29 aa, Homo sapiens
MELLFFLLLPYFLLFICLISCISQIYIYL

SEQ ID NO: 3968 - protein, 64 aa, Homo sapiens
MPSFIIHSNPIWLGALLWVSHCPSSILGSLRPRGGKIQLRVGGSEPRRIMKATCFGNDLPLPVV

SEQ ID NO: 3969 - protein, 39 aa, Homo sapiens
MAGKASLTSSASVIAWPSLLCLLLLWMPVIGFCAYHTPM

SEQ ID NO: 3970 - protein, 129 aa, Homo sapiens [sequence omitted]

SEQ ID NO: 3971 - protein, 66 aa, Homo sapiens
MCCPSLLKFYFRFSIGYLFCFLYFFSLSLPPSRPPRPIPFLPLDFHPLGCLAHLYAPALGTGPNTW

SEQ ID NO: 3972 - protein, 55 aa, Homo sapiens
MSVGLSSSFLILFMPCQVYCLYPLVNFFISVIIRLKKKKKKKKESSLLGNAWTLC

SEQ ID NO: 3973 - protein, 46 aa, Homo sapiens
  SITE (13): Xaa equals any of the naturally occurring L-amino acids
MHLIIFFLSLLCXFLKLPPKYLSTPLNVWSQDKFLILALQFKMYKK

SEQ ID NO: 3974 - protein, 1 aa, Homo sapiens
L

SEQ ID NO: 3975 - protein, 40 aa, Homo sapiens [sequence omitted]

SEQ ID NO: 3976 - protein, 34 aa, Homo sapiens
LELTVLSSLRTFEYTLPISLPYFLFAAFALELCF

SEQ ID NO: 3977 - protein, 21 aa, Homo sapiens
DCPARAAPQPADLTAAPASVA

SEQ ID NO: 3978 - protein, 35 aa, Homo sapiens
MTMKLSVFLSVQNLGLLSVVLKRALALSTPSLEIC

SEQ ID NO: 3979 - protein, 1 aa, Homo sapiens
M

SEQ ID NO: 3980 - protein, 28 aa, Homo sapiens
MVLFNAHGCFLICGLLVSRAMHNVSEGS

SEQ ID NO: 3981 - protein, 4 aa, Homo sapiens
FGFV

SEQ ID NO: 3982 - protein, 1 aa, Homo sapiens
M

SEQ ID NO: 3983 - protein, 17 aa, Homo sapiens
MVGLWFVFSLYSLVTFL

SEQ ID NO: 3984 - protein, 38 aa, Homo sapiens
MLGCLLVVFLCCLILGKLLCKAKNPVNTILSFTGRHYW

SEQ ID NO: 3985 - protein, 13 aa, Homo sapiens
GNSLTLAILLLSF

SEQ ID NO: 3986 - protein, 59 aa, Homo sapiens
MWRLAPRRLRQVHAKPAWLSSGFLLTRWMPVPRPPDRALQHWRGLWWGPRCRTGTASAH

SEQ ID NO: 3987 - protein, 670 aa, Homo sapiens
DCVLVLLLMPRLICKAELIRKQAQEKFELSENCSERPGLRGAAGEQLSFAAGLVYSLSLLQATLHRYEHALSQCSVDVYKKVGSLYPEMSAHERSLDFLIELLHKDQLDETVNVEPLTKAIKYYQHLYSIHLAEQPEDCTMQLADHIKFTQSALDCMSVEVRRLRAFLQGGQEATDIALLLRDLETSCSDIRQFCKKIRRRMPGTDAPGIPAALAFGPQVSDTLLDCRKHLTWVVAVLQEVAAAAAQLIAPLAENEGLLVAALEELAFKASEQIYGTPSSSPYECLRQSCNILISTMNKLATAMQEGEYDAERPPSKPPPVELRAAALRAEITDAEGLGLKLEDRETVIKELKKSLKIKGEELSEANVRLSLLEKKLDSAAKDADERIEKVQTRLEETQALLRKKEKEFEETMDALQADIDQLEAEKAELKQRLNSQSKRTIEGLRGPPPSGIATLVSGIAGGAIPGQAPGSVPGPGLVKDSPLLLQQISAMRLHISQLQHENSILKGAQMKASLASLPPLHVAKLSHEGPGSELPAGALYRKTSQLLETLNQLSTHTHVVDITRTSPAAKSPSAQLMEQVAQLKSLSDTVEKLKDEVLKETVSQRPGATVPTDFATFPSSAFLRAKEEQQDDTVYMGKVTFSCAAGFGQRHRLVLTQEQLHQLHSRLIS

SEQ ID NO: 3988 - protein, 45 aa, Homo sapiens
MFFSQLNCCISQTLGSMKAGRGNLNINYEHKFEGKKTKNHYLIKL

SEQ ID NO: 3989 - protein, 27 aa, Homo sapiens
MVVHILWSWCCRGLAGTAALPRVLFYF

SEQ ID NO: 3990 - protein, 56 aa, Homo sapiens
MGPHWGREASCFLWFPAGQSCPPFPVLPTLGNREGRRGEEREDPGGLGRSSLKRLL

SEQ ID NO: 3991 - protein, 60 aa, Homo sapiens
MMSFVWSRVPYCILLWCFLHLCQPVTVSWSLSFMTLTLWKSPGQLFYRIFPSFSLFNVFT

SEQ ID NO: 3992 - protein, 61 aa, Homo sapiens
MLVVSKASHFTLFLNCLFLKICLKKILRWQHIQVATEGGVTSDKLTSMSLANLDFWSQAPD

SEQ ID NO: 3993 - protein, 31 aa, Homo sapiens
MPCRMDRMTDRDEAETSTDPSHQVEPFFFLF

SEQ ID NO: 3994 - protein, 15 aa, Homo sapiens
MTRAILCLLLCCPGH

SEQ ID NO: 3995 - protein, 6 aa, Homo sapiens
MKILVL

SEQ ID NO: 3996 - protein, 149 aa, Homo sapiens
MAYTLLGLLWLHRGGAVGLGPRYLKDVFAAMALLYGPVQWLRLWTQWRRAAVLDQWLTLPIFAWPVAWCLYLNRGWRPWLFLSLECVSLASYGLSLCIPRGFEVALGAHMWPLWGRRCAPNRHYGNTTSATYSPLGVPLLPGLCGPQAV

SEQ ID NO: 3997 - protein, 23 aa, Homo sapiens
MKLNNKQCHLYMGTMPSSSCCVF

SEQ ID NO: 3998 - protein, 58 aa, Homo sapiens
LQLGLCCLPVLFVALGMASDPIFTLAPPLHCHYGAFPPNASGWEQPPNASGVTSPALP

SEQ ID NO: 3999 - protein, 60 aa, Homo sapiens
MAVTALAARTWLGVWGVRTMQARGFGSDQSENVDRGAGSIREAGGAFGKREQAEEERYFR

SEQ ID NO: 4000 - protein, 53 aa, Homo sapiens
VLSCILALLVKHSKASTHPPFSPLGKAVDCNIHTAPWAMVKSLAEGLGEALCV

SEQ ID NO: 4001 - protein, 35 aa, Homo sapiens
MCPLTTASEALSAIKMQILGLILLLLNPGISGGNS

SEQ ID NO: 4002 - protein, 38 aa, Homo sapiens
MRSEGGRLIKTTKNIIVVTLLFFFFCGGGDSTIIKIQT

SEQ ID NO: 4003 - protein, 38 aa, Homo sapiens; identical to SEQ ID NO: 4002

SEQ ID NO: 4004 - protein, 27 aa, Homo sapiens
MYLDQSSLVFLTLAMSHCHLMGPIWVL

SEQ ID NO: 4005 - protein, 32 aa, Homo sapiens
MTGRQSLRPGCALLLLPSVFSQLLSLGAPGSE

SEQ ID NO: 4006 - protein, 59 aa, Homo sapiens [sequence omitted]

SEQ ID NO: 4007 - protein, 40 aa, Homo sapiens
MVLLRVLASHLHHFYFSFTICIFQSAYILTLLLVVLMTSD

SEQ ID NO: 4008 - protein, 2 aa, Homo sapiens
WN

SEQ ID NO: 4009 - protein, 28 aa, Homo sapiens
MTLAFVTLVRVISTIIGGMADQGEVKSQ

SEQ ID NO: 4010 - protein, 8 aa, Homo sapiens
MCRWFVSE

SEQ ID NO: 4011 - protein, 20 aa, Homo sapiens
MFSQLLLYCVYLYCCRGGCF

SEQ ID NO: 4012 - protein, 40 aa, Homo sapiens
MELKKNVFSVSSLCTPSHYSSHTLHFFFFFKAALIGCYIL

SEQ ID NO: 4013 - protein, 4 aa, Homo sapiens
  SITE (2): Xaa equals any of the naturally occurring L-amino acids
MXSY

SEQ ID NO: 4014 - protein, 38 aa, Homo sapiens
MVARCFLTFLRVNSLSQGTVEMGVWSGFPPQSLLITAQ

SEQ ID NO: 4015 - protein, 1 aa, Homo sapiens
I

SEQ ID NO: 4016 - protein, 65 aa, Homo sapiens
MRFFLFPYYCFILSCHSKLTFFGMFFLYLCPFRSALDSLGGLLQWVCLNIVIPHVADWETLLFNW

SEQ ID NO: 4017 - protein, 40 aa, Homo sapiens
MLSLSSLSRCKLYVYWLCSLILFHGKYKQFSAYKYWKKLS

SEQ ID NO: 4018 - protein, 15 aa, Homo sapiens
MFVDVSWFLVFTLLP

SEQ ID NO: 4019 - protein, 39 aa, Homo sapiens
MSHFSCVILILTGIRWHGLVFSQFQNIFLHCFNVKKMKI

SEQ ID NO: 4020 - protein, 3 aa, Homo sapiens
LLG

SEQ ID NO: 4021 - protein, 36 aa, Homo sapiens
MKLFLPRPLSAARVRGLLFCIFIALRHLVLCDYHTY

SEQ ID NO: 4022 - protein, 295 aa, Homo sapiens
MASIAKQTSSLVPPYLGMILTALLQGLAGRTWAGKEELLKAIACVVTACSAELEKSVPNQPSTNEILQAVLKECSKENVKYKIVAISCAADILKATKEDRFQEFSNIVIPLIKKNSLESSGVRTTKNEEENEKEKELQLEYLLGAFESLGKAWPRNAETQRCYRQELCKLMCERLKLSTWKVQLGVLQSMNAFFQGLMLLEEEHADPEALAEILLETCKSITYSLENKTYSSVRTEALSVIELLLKKLEESKQWECLTSECRVLLIESLATMEPDSRPELQEKAALLKKTLENLE

SEQ ID NO: 4023 - protein, 36 aa, Homo sapiens
MQPPISSYSFLVFWLTVQPCGFCAASSARKIKPSFS

SEQ ID NO: 4024 - protein, 37 aa, Homo sapiens
MLLLSTLYLPSALSRKTFVLLKTKDVFILDPEERSLL

SEQ ID NO: 4025 - protein, 34 aa, Homo sapiens
MGQGSHLMLVFLILYYIVLFMIQLILTKFVAVEP

SEQ ID NO: 4026 - protein, 34 aa, Homo sapiens
MVFTCPHQKPALSRLLRLLLLNRSAICIPGAPQG

SEQ ID NO: 4027 - protein, 6 aa, Homo sapiens
SWLPPI

SEQ ID NO: 4028 - protein, 16 aa, Homo sapiens
VIISSVFSFVLLSCIH

SEQ ID NO: 4029 - protein, 319 aa, Homo sapiens
MQTCPLAFPGHVSQALGTLLFLAASLSAQNEGWDSPICTEGVVSVSWGENTVMSCNISNAFSHVNIKLRAHGQESAIFNEVAPGSGRRGTAGDQRRPGLRAGAQQGLSRASAELWTPDSEPTPRPLALVFKPSPLGALELLSPQPLFHMPQTHSRLQGREDTGEPALSADLGWRGLGLSSHPEGTDTGLLGRLGLCVTHSWVRADPSPPPPRSSKLCFLSFQNGTTSPPQHPTYQDACPSLCPHQTHRPGLPFCHPRLVRPQVWGPLSPLPGLRAQVRGPLPEPQTHSSSGLWGALATYLSLGYEQALGALPRQPRGPR

SEQ ID NO: 4030 - protein, 30 aa, Homo sapiens
MSISVFSLLLSFLIDGSFSLLPRGCQNFAS

SEQ ID NO: 4031 - protein, 60 aa, Homo sapiens
FYSFFLPHKGLVLFNYTGASSSFLFPSSELPAEILPQLIDKKILIPRSEFRNILINESSC

SEQ ID NO: 4032 - protein, 49 aa, Homo sapiens
MSLTQEPRGRQRRTKVINLHLFLFLFFFFFSSVVTSFPLSFFILPGPLP

SEQ ID NO: 4033 - protein, 8 aa, Homo sapiens
MTTWPTCS

SEQ ID NO: 4034 - protein, 158 aa, Homo sapiens
MGSQALPPGPMQTLIFFDMEATGLPFSQPKVTELCLLAVHRCALESPPTSQGPPPTVPPPPRVVDKLSLCVAPGKACSPAASEITGLSTAVLAAHGRQCFDDNLANLLLAFLRRQHSPGAWWHTMVTATTSPCSKQSWLCWASPVLWMVPSVWIASLR

SEQ ID NO: 4035 - protein, 42 aa, Homo sapiens
MAVAAWVMSVSLHLGFPWALSRQRHPQSHHHCESFGSFSIWA

SEQ ID NO: 4036 - protein, 22 aa, Homo sapiens
LAVLLPQRVLLSVFLCLLPLQR

SEQ ID NO: 4037 - protein, 94 aa, Homo sapiens [sequence omitted]

SEQ ID NO: 4038 - protein, 32 aa, Homo sapiens
MPIKIYFLLVISTLFLILTFITGNVPVHVGSR

SEQ ID NO: 4039 - protein, 28 aa, Homo sapiens
MDFLLFLSGSSSFLSLFLFIYLFIYFAV

SEQ ID NO: 4040 - protein, 49 aa, Homo sapiens
MGALCVHCCILAFCTYGSGISLFPYLLICLRGRNIHYAMTIPVLVNVPV

SEQ ID NO: 4041 - protein, 31 aa, Homo sapiens
MYKEIPVKLFCLMFYWTKVVVCMECSSSVYR

SEQ ID NO: 4042 - protein, 25 aa, Homo sapiens
RKWWPQDIHLTVAVATLWSSSGHQW

SEQ ID NO: 4043 - protein, 46 aa, Homo sapiens
  SITE (36): Xaa equals any of the naturally occurring L-amino acids
MNVTVTLPKYHLALIWLLFHFGWALLSVCSKTVLMXLSNVHNAVIG

SEQ ID NO: 4044 - protein, 49 aa, Homo sapiens
MVLVTWPLFTAPFASTSCCAGLEVATMACFKEGNSGTVAPSGVEDSELP

SEQ ID NO: 4045 - protein, 34 aa, Homo sapiens
MCVTFLSACCIYAFYLLLFSLFIQVTKRMLEQAW

SEQ ID NO: 4046 - protein, 31 aa, Homo sapiens
MKPHLHLPLLFLPTLSNITFTLNFSVYRKEN

SEQ ID NO: 4047 - protein, 32 aa, Homo sapiens
MIQHVVFCVWLLSFSIFKLHLSSSLCRYCIAG

SEQ ID NO: 4048 - protein, 216 aa, Homo sapiens
  SITE (101): Xaa equals any of the naturally occurring L-amino acids
MEMRSVLRKAGSPRKARRARLNPLVLLLDAALTGELEVVQQAVKEMNDPSQPNEEGITALHNAICGANYSIVDFLITAGANVNSPDSHGWTPLHCAASCNXTVICMALVQHGAAIFATTLSDGATAFEKCDPYREGYADCATYLADVEQSMGLMNSGAVYALWDYSAEFGDELSFREGESVTVLRRDGPERPTGGGPRCTARRATCRGTTSGCSPG

SEQ ID NO: 4049 - protein, 36 aa, Homo sapiens
MLLWLWSGPGMAVGPCRGVALLARSGMCSAEAVNSW

SEQ ID NO: 4050 - protein, 59 aa, Homo sapiens
MCVCVYVCACLCPRPCVPHTAPLSSVLPRDPSELACGAREAPWMGGGATGRLEGLHQAH

SEQ ID NO: 4051 - protein, 55 aa, Homo sapiens [sequence omitted]

SEQ ID NO: 4052 - protein, 347 aa, Homo sapiens
MFYCTRTLPNVLALPVVLLALAAWLRHEWARFIWLSAFAIIVFRVELCLFLGLLLLLALGNRKVSVVRALRHAVPAGILCLGLTVAVDSYFWRQLTWPEGKVLWYNTVLNKSSNWGTSPLLWYFYSALPRGLGCSLLFIPLGLVDRRTHAPTVLALGFMALYSLLPHKELRFIIYAFPMLNITAARGCSYLLNNYKKSWLYKAGSLLVIGHLVVNAAYSATALYVSHFNYPGGVAMQRLHQLVPPQTDVLLHIDVAAAQTGVSRFLQVNSAWRYDKREDVQPGTGMLAYTHISWRRPWAPGPLQGHTPGPGQRRGDHRCESEPDPTAPFNVHLQTKLVLLERLPRPS

SEQ ID NO: 4053 - protein, 28 aa, Homo sapiens
PFALSLQRVPFVLPSPQVASLPLGHSRG

SEQ ID NO: 4054 - protein, 410 aa, Homo sapiens
  SITE (83): Xaa equals any of the naturally occurring L-amino acids
MADSSGRGAGKPATGPTNSSSAKKKDKRVQGGRVIESRYLQYEKKTTQKAPAGDGSQTRGKMSEGGRKSSLLQKSKADSSGVXKGDLQSTLLEGHGTAPPDLDLSAINDKSIVKKTPQLAKTISKKPESTSFSAPRKKSPDLSEAMEMMESQTLLLTLLSVKMENNLAEFERRAEKNLLIMCKEKEKLQKKAHELKRRLLLSQRKRELADVLDAQIEMLSPFEAVATRFKEQYRTFATALDTTRHELPVRSIHLEGDGQQLLDALQHELVTTQRLLGELDVGDSEENVQVLDLLSELKDVTAKKDLELRRSFAQVLELSAEASKEAALANQEVWEETQGMAPPSRWYFNQDSACRESGGAPKNTPLSEDDNPGASSAPAQATFISPSEDFSSSSQAEVPPSLSRSGRDLS

SEQ ID NO: 4055 - protein, 66 aa, Homo sapiens
MFCWCGLCTSGMVTTGGSPQKHSFFYTSSQGHVSCPSLPGCGQKVICSWPSGGGGGPESEEMAQGQ

SEQ ID NO: 4056 - protein, 66 aa, Homo sapiens; identical to SEQ ID NO: 4055

SEQ ID NO: 4057 - protein, 29 aa, Homo sapiens
GFLGILYLTIFILYQTHLQFLGLLVKTFF

SEQ ID NO: 4058 - protein, 83 aa, Homo sapiens
PPDSRKVLRLNGVSSVYAALALHLRVPGRHLSLGFIFHGDMTCWLKHYSVLFLVGTGTELELFWSVPSYLKMLCCTIILKNYK

SEQ ID NO: 4059 - protein, 61 aa, Homo sapiens [sequence omitted]

SEQ ID NO: 4060 - protein, 36 aa, Homo sapiens
CVCVFICFLPSQFFSPLPTTTMTPSRETINVPIMFV

SEQ ID NO: 4061 - protein, 61 aa, Homo sapiens
MTIMFPQLFYFPTSFAVLSVAGRRKCCWLAQKKLLLLRLLLLSAISVTIETGAVYARGAGS

SEQ ID NO: 4062 - protein, 7 aa, Homo sapiens
MGCIIAT

SEQ ID NO: 4063 - protein, 11 aa, Homo sapiens
MFSPHMYICHM

SEQ ID NO: 4064 - protein, 16 aa, Homo sapiens
MRMCVCTSLSLCGMCV

SEQ ID NO: 4065 - protein, 47 aa, Homo sapiens
MSSRPVLWLMLLVGWMWIKKLCNTGGTQMCLGLGTAPTFLRQRPLLQ

SEQ ID NO: 4066 - protein, 31 aa, Homo sapiens
MTSAFLIHLTLVLVPTVNKTQTLGSKISCSR

SEQ ID NO: 4067 - protein, 8 aa, Homo sapiens
SWLKKLYF

SEQ ID NO: 4068 - protein, 42 aa, Homo sapiens
MEVLQSVLLLLLFSSLISSVFLISVVISGQLMAAQGTGICLA

SEQ ID NO: 4069 - protein, 19 aa, Homo sapiens
MFTLLFFLVTYILITGMLK

SEQ ID NO: 4070 - protein, 39 aa, Homo sapiens
MLQLFLASFIVLLQILIPFVLVMCAFEAVQLTTQLSSKR

SEQ ID NO: 4071 - protein, 305 aa, Homo sapiens
MESHVFLKAKTRDEYLSLVARLIIHFRDIHNKKSQASVSDPMNALQSLTGGPAAGAAGIGMPPRGPGQSLGGMGSLGAMGQPMSLSGQPPPGTSGMAPHSMAVVSTATPQTQLQLQQVALQQQQQQQQFQQQQQAALQQQQQQQQQQQFQAQQSAMQQQFQAVVQQQQQLQQQQQQQQHLIKLHHQNQQQIQQQQQQLQRIAQLQLQQQQQQQQQQQQQQQQALQAQPPIQQPPMQQPQPPPSQALPQQLQQMHHTQHHQPPPQPQQPPVAQNQPSQLPPQSQTQPLVSQAQALPGQMLYTQPPI

SEQ ID NO: 4072 - protein, 4 aa, Homo sapiens
MVCA

SEQ ID NO: 4073 - protein, 21 aa, Homo sapiens
MYFIPLLHIGQIAMCMHILFS

SEQ ID NO: 4074 - protein, 21 aa, Homo sapiens
MYFIPLLHIGQIAMCMHILFS

SEQ ID NO: 4075 - protein, 25 aa, Homo sapiens
MKGADKSSTLILCFLSVLPCCHLHG

SEQ ID NO: 4076 - protein, 25 aa, Homo sapiens
MKGADKSSTLILCFLSVLPCCHLHG

SEQ ID NO: 4077 - protein, 39 aa, Homo sapiens
  SITE (2): Xaa equals any of the naturally occurring L-amino acids
MXHLGLWGVILKLVVPGNHGPLALINPSFNGLLHPDTKV

SEQ ID NO: 4078 - protein, 9 aa, Homo sapiens
MEFLSLELA

SEQ ID NO: 4079 - protein, 44 aa, Homo sapiens
MIRLSAMLLVEMHVNLPASLSVFLDSGQLKSPNTFTFATQRGSS

SEQ ID NO: 4080 - protein, 39 aa, Homo sapiens
MVFIFLLSILFVSALVFITSFLLLALDLACSSLFRFLVV

SEQ ID NO: 4081 - protein, 46 aa, Homo sapiens
MDGWHEILKKILLLFQKCHSSPLKVQETWLSSVVYGGAWASESGQR

SEQ ID NO: 4082 - protein, 95 aa, Homo sapiens [sequence omitted]

SEQ ID NO: 4083 - protein, 194 aa, Homo sapiens
MLAAVGRPKPRSPLSSLSTLQLYLFCSSTRRADMDPNPRAALERQQLRLRERQKFFEDILQPETEFVFPLSHLHLESQRPPIGSISSMEVNVDTLEQVELIDLGDPDAADVFLPCEDPPPTPQSSGVDNHLEELSLPVPTSDRTTSRTSSSSSSDSSTNLHSPNPSDDGADTPLAQSDEEEERGDGGAEPGACS

SEQ ID NO: 4084 - protein, 22 aa, Homo sapiens
MGVRSRAWAFLTFTSTLATRSR

SEQ ID NO: 4085 - protein, 58 aa, Homo sapiens
MPGVGWAQALKSPFCLVVLHLALPGLWCRLGVDLSSVIYVCCLAPRWLCGQVLAKDII

SEQ ID NO: 4086 - protein, 58 aa, Homo sapiens; identical to SEQ ID NO: 4085

SEQ ID NO: 4087 - protein, 58 aa, Homo sapiens; identical to SEQ ID NO: 4085

SEQ ID NO: 4088 - protein, 443 aa, Homo sapiens
MAHHLYVLQALMLGLLEPRMRTPLDPYSQEQREQLQVLRQAAFEVEGESSGAGLSADRRRSLCAREFRKLGFSNSNPAQDLERVPPGLLALDNMLYFSRNAPSAYSRFVLENSSREDKHECPFARGSIQLTVLLCELLRVGEPCSETAQDFSPMFFGQDQSFHELFCVGIQLLNKTWKEMRATQEDFDKVMQVVREQLARTLALKPTSLELFRTKVNALTYGEVLRLRQTERLHQEGTLAPPILELREKLKPELMGLIRQQRLLRLCEGTLFRKISSRRRQDKLWFCCLSPNHKLLQYGDMEEGASPPTLESLPEQLPVADMRALLTGKDCPHVREKGSGKQNKDLYELAFSISYDRGEEEAYLNFIAPSKREFYLWTDGLSALLGSPMGSEQTRLDLEQLLTMETKLRLLELENVPIPERPPPVPPPPTNFNFCYDCSIAEP

SEQ ID NO: 4089 - protein, 31 aa, Homo sapiens
MKIPLYWRSHEMGLSYTCLLWHAIWQQGWGG

SEQ ID NO: 4090 - protein, 31 aa, Homo sapiens
MLLPLCWSSSYSIFIFWATERDSCLEKKKKK

SEQ ID NO: 4091 - protein, 32 aa, Homo sapiens
LIVLLVVFLPQSSDSSSAPRTQDAGIASGPGN

SEQ ID NO: 4092 - protein, 51 aa, Homo sapiens
MPGRRPPLAMWQPLLLCLTSAFQRAPILLSHKINLMPSGKKKKKKKKKKKK

SEQ ID NO: 4093 - protein, 37 aa, Homo sapiens
MPRPACLLIFISGHTLLALPVCPAPAHAPPPRAASVL

SEQ ID NO: 4094 - protein, 59 aa, Homo sapiens
MTRLLVALLFSSFLKLREVESISKIKNKMSKRQDLRTGWACSNMTACTLWGKIYWSSQV

SEQ ID NO: 4095 - protein, 39 aa, Homo sapiens
KAALSGSEIMCHFWWVAGPAIANYHKQKCILLYNSGGKV

SEQ ID NO: 4096 - protein, 120 aa, Homo sapiens
QGRVVPVHLVLLPGVLIPHGPPMCGPDPKYPQDNHEHQEADAHHDHNCRSAGDDCGRMRGRDARSLGPEGHCALDLLGCAWSKRAGQHASAEPTGQEEIPGKARHGPPTWLGHVLLHSCG

SEQ ID NO: 4097 - protein, 45 aa, Homo sapiens
  SITE (36): Xaa equals any of the naturally occurring L-amino acids
  SITE (37): Xaa equals any of the naturally occurring L-amino acids
  SITE (41): Xaa equals any of the naturally occurring L-amino acids
MFLQQLWWQLSLRNLWCVVGSYQNKKCRHFPFFWGXXVGGXALPS

SEQ ID NO: 4098 - protein, 20 aa, Homo sapiens
MACFLAVVMWVFLPVGSCPL

SEQ ID NO: 4099 - protein, 44 aa, Homo sapiens [sequence omitted]

SEQ ID NO: 4100 - protein, 35 aa, Homo sapiens
MALNTISHQIYLPPGPLPCPWASCILLPTCTYVWT

SEQ ID NO: 4101 - protein, 33 aa, Homo sapiens
TKPPLSVLFWGVGWVCVWGWVGMGNPSPSRSWG

SEQ ID NO: 4102 - protein, 39 aa, Homo sapiens
MIILNTIKVLILFVFVFMMCDNILGITQKELYFFKKFTF

SEQ ID NO: 4103 - protein, 29 aa, Homo sapiens
MWLQGLPAAILHAAGSAFHDPRQQPGPHS

SEQ ID NO: 4104 - protein, 33 aa, Homo sapiens
MIGCVIPYILILNYIIGGSFCFTLMCPGDSCLA

SEQ ID NO: 4105 - protein, 48 aa, Homo sapiens
MMVIVCVIVQKALSVPSPLQGTLLTPILQGLLQMPFSPGKPFRILSWI

SEQ ID NO: 4106 - protein, 49 aa, Homo sapiens
MHTHGSCLSMHWFCHWRPGIRPCWGAGAVRLRLILARAHTSKGQAGSAW

SEQ ID NO: 4107 - protein, 34 aa, Homo sapiens
MAACCSALLLLFPPCFHLCSLEAFPSWCVQDSSW

SEQ ID NO: 4108 - protein, 34 aa, Homo sapiens; identical to SEQ ID NO: 4107

SEQ ID NO: 4109 - protein, 21 aa, Homo sapiens
LLLHSVHLLLYEMTLRPPILL

SEQ ID NO: 4110 - protein, 36 aa, Homo sapiens
MTQNDLAAVLLRWRRPGLGWCSRLLTACCLPTLPAS

SEQ ID NO: 4111 - protein, 4 aa, Homo sapiens
MCAF

SEQ ID NO: 4112 - protein, 29 aa, Homo sapiens
PQVVCRVVFTPCQSPHSPARQTVFNSFHG

SEQ ID NO: 4113 - protein, 49 aa, Homo sapiens
EWGGLRKLIICACFPFTFCHDCKFLKPPQPFLTANRTVSKSNFLSFSLR

SEQ ID NO: 4114 - protein, 36 aa, Homo sapiens
CLQIASCFPFCQILIIFFFQKGKKKHKQPNFIFHIV

SEQ ID NO: 4115 - protein, 10 aa, Homo sapiens
MKTFVCAFDL

SEQ ID NO: 4116 - protein, 31 aa, Homo sapiens
MKMTFMYGRLTFFLSLPTLYLCYFYLPNKIP

SEQ ID NO: 4117 - protein, 84 aa, Homo sapiens
  SITE (25): Xaa equals any of the naturally occurring L-amino acids
MIWSAGRWTYAVLFHCCQTLLPWKXPLEKVWHHQDGQVGSGLSVQPRTQPPVSWLAVPGLAPFQQLSRPGRSGLSCSDSYSLIL

SEQ ID NO: 4118 - protein, 46 aa, Homo sapiens
MQVKVPSGRLAVTPFRLLAVALWTVSFLPLPLRRVVGTATSRLPDR

SEQ ID NO: 4119 - protein, 10 aa, Homo sapiens
SMVWLLGWCL

SEQ ID NO: 4120 - protein, 35 aa, Homo sapiens
MKSGCLKESGTPPFSCSCSCSPHDVTCLLSLCVLP

SEQ ID NO: 4121 - protein, 28 aa, Homo sapiens
MVNMGSAWPFLYGYFSLKMVLMFIHIYS

SEQ ID NO: 4122 - protein, 7 aa, Homo sapiens
MVDEKGF

SEQ ID NO: 4123 - protein, 4 aa, Homo sapiens
GFDL

SEQ ID NO: 4124 - protein, 60 aa, Homo sapiens [sequence omitted]

SEQ ID NO: 4125 - protein, 27 aa, Homo sapiens
MPPSPLGWCCGSIWWLYRQWVAAQLKN

SEQ ID NO: 4126 - protein, 119 aa, Homo sapiens
MLPLPSDAGLALLLQVCFSHSCGCRNLIYREEPVAAAAPATAALTVLTTHLGQPSLAGALVASHFPFPSLWLRGGVRGWRGRAAYHGLGLEEDEFVDLNKEFVILKKKKKKKKKKKKKK

SEQ ID NO: 4127 - protein, 6 aa, Homo sapiens
MAARGL

SEQ ID NO: 4128 - protein, 36 aa, Homo sapiens
VCSNMRSRSGTSSPARWGPATSRITWPSCSITVREP

SEQ ID NO: 4129 - protein, 49 aa, Homo sapiens
  SITE (34): Xaa equals any of the naturally occurring L-amino acids
  SITE (38): Xaa equals any of the naturally occurring L-amino acids
  SITE (39): Xaa equals any of the naturally occurring L-amino acids
MGLVRYVSISLCWFFCLQKPRFLFLFEKKKKKKXGGLXXGPGAHGFSHP

SEQ ID NO: 4130 - protein, 49 aa, Homo sapiens; identical to SEQ ID NO: 4129
  SITE (34): Xaa equals any of the naturally occurring L-amino acids
  SITE (38): Xaa equals any of the naturally occurring L-amino acids
  SITE (39): Xaa equals any of the naturally occurring L-amino acids

SEQ ID NO: 4131 - protein, 43 aa, Homo sapiens
MNQCRCIQFFFWKWKLHFIIVILRVIQDFEKSFGKNRKMLEKI

SEQ ID NO: 4132 - protein, 12 aa, Homo sapiens
MSCTLCFGSYVL

SEQ ID NO: 4133 - protein, 32 aa, Homo sapiens
MKSLLPGFGYCQSSPASFLYPFLSFPSLPRSS

SEQ ID NO: 4134 - protein, 43 aa, Homo sapiens [sequence omitted]

SEQ ID NO: 4135 - protein, 41 aa, Homo sapiens
MTISSQFLFFIFYFHLYVFEGRGKIKVCAHYTILVFPKSVP

SEQ ID NO: 4136 - protein, 33 aa, Homo sapiens
MGLVRYVSISLCWFFCLQKPRFLFLFEKKKKKK

SEQ ID NO: 4137 - protein, 66 aa, Homo sapiens
MGLQDNRILSPFLAIWVLFFKSFGLGRALFFFCFDIFIFSAVTGCQHNLHQLEIRNQKKKKKILTT

SEQ ID NO: 4138 - protein, 39 aa, Homo sapiens
MGRLGRELRTAYLLFILRLSYTSAGLSLRGTISSVSQPQ

SEQ ID NO: 4139 - protein, 30 aa, Homo sapiens
MWILSCIFMINVIVAVLPMRVGLEGLNNLS

SEQ ID NO: 4140 - protein, 38 aa, Homo sapiens
MPLNSLPQLAFHWELPLQFLVVLVCMTLGITVHHPHQS

SEQ ID NO: 4141 - protein, 243 aa, Homo sapiens
LAALSLHAAGSVLGVPPRAAVHPARRGRPAAGPGGLLHLPGGQPPEGPVPPHGWALPHLGQEAQGHRVLLHIRRRAEAPQQAAGVGLLGRGPPLQLRRRPDGQPGLLPGLWRWPPAALLLHHLHGHPADPPLPPGRAPLRQQVRPGLGALHRRSALPPAAWNLLRARPREKPCGAVKSVFCQVHGGWHPSSNSRSLSFLICKLERAQHLAGVQYLITLCSLLLPSREFRVSSTAVLPAQTDFL

SEQ ID NO: 4142 - protein, 33 aa, Homo sapiens
MLCSWFFLPLFLTILNIATTSTLCKHQVCAPYT

SEQ ID NO: 4143 - protein, 44 aa, Homo sapiens
VSLSCFLTLLPGLLCVHLRLAWSKQVRPLLLYSLVLFWHLVKLA

SEQ ID NO: 4144 - protein, 117 aa, Homo sapiens
  SITE (117): Xaa equals any of the naturally occurring L-amino acids
MDLSHLLALWCHPGLHCCWTCCSSPSQTTSFQSPFQFLLHPPPMASNSAALCSPLSVLSPEFHLLTRPGPLLPFPQALQLFFRTESLNSPFILLLLHLQKKKKKKKKKKKKKKKKKX

SEQ ID NO: 4145 - protein, 39 aa, Homo sapiens
MYLSISIFFFGFCIISCKCIVKNFIFGVAMRGGEVRLCT

SEQ ID NO: 4146 - protein, 32 aa, Homo sapiens
MPRGFTWLRYLGIFLGVALGNEPSENVALDAE

SEQ ID NO: 4147 - protein, 31 aa, Homo sapiens
MQCIIIFSILFCLFFCSCLTQNIKLVLQPTI

SEQ ID NO: 4148 - protein, 50 aa, Homo sapiens
MWIPLRPAPLHWSWRLIWEAVCALAPEGTWSTPHLENPHPEHSFPGAPLT

SEQ ID NO: 4149 - protein, 85 aa, Homo sapiens
MVGGPPFVGPVGFGPGDRSHLDSPEAREPCSCGGQLWPPRGPLSCVQPSSPTCYREQQPAPALWPYGPLTRPSWAPLCLGPLDHP

SEQ ID NO: 4150 - protein, 67 aa, Homo sapiens
MVSLALTLTIPSPILWTICMAILRVRTPCERPSSSCIQTGQTVTTLRPAVKHWWHSSLTTSGWSPQW

SEQ ID NO: 4151 - protein, 28 aa, Homo sapiens
MYIKLLIVLLESFALLSCLMEQFLMEMC

SEQ ID NO: 4152 - protein, 39 aa, Homo sapiens
MIWALGNLEVLGLCLCSSIFIRKESIGLLQGINPFVTYH

SEQ ID NO: 4153 - protein, 54 aa, Homo sapiens [sequence omitted]

SEQ ID NO: 4154 - protein, 38 aa, Homo sapiens
MSLNFVRIFIIVFHICEISSFFRVHRVSLFYRFLKMRF

SEQ ID NO: 4155 - protein, 179 aa, Homo sapiens
MGLIFAKLWSLFCNQEHKVIIVGLDNAGKTTILYQFLMNEVVHTSPTIGSNVEEIVVKNTHFLMWDIGGQESLRSSWNTYYSNTEFIILVVDSIDRERLAITKEELYRMLAHEDLRKAAVLIFANKQDMKGCMTAAEISKYLTLSSIKDHPWHIQSCCALTGEGLCQGLEWMTSRIGVR

SEQ ID NO: 4156 - protein, 81 aa, Homo sapiens
MFNFGSPMWLFVRSGLLKLDLARYSLPCWRFIPTNQLCGLWQPNGKWKIDCLQKAQGNYFFAHCAFIQSAQNFIKNTLGWS

SEQ ID NO: 4157 - protein, 55 aa, Homo sapiens
MFIYESNIANLSLIILFLKHQVYSQCVALMTISWERNRTAIMTNGKDSKAVSDGK

SEQ ID NO: 4158 - protein, 29 aa, Homo sapiens
MSLLPSMYLLCSTVEIFLPIFKLGFFFCY

SEQ ID NO: 4159 - protein, 31 aa, Homo sapiens
MTGCLCTVCIWLSRCLCAESMPPVGIRFYLF

SEQ ID NO: 4160 - protein, 33 aa, Homo sapiens
MSLWMHRLTSLSLQILSSAEGIIISHRTVMKTK

SEQ ID NO: 4161 - protein, 24 aa, Homo sapiens
MRNQGAWLWVSSICLACGASCGDQ

SEQ ID NO: 4162 - protein, 43 aa, Homo sapiens
MPARTSGKQSHICENSGRRCSLLLLVKCLERRGRSPTKGTPSG

SEQ ID NO: 4163 - protein, 32 aa, Homo sapiens
MMNYLLKLFTVPLPAICFLFFFSPAPSVCHMF

SEQ ID NO: 4164 - protein, 56 aa, Homo sapiens
MPTWVLCGRTSLLSHSWCGSGQQMKTPLPTTRSPTALSVHLSLAATSTSACTRAME

SEQ ID NO: 4165 - protein, 63 aa, Homo sapiens
MLPQMYLKSRHSFTKEEEAVLFCLIALVTKLMFTSLSLAPGSALILQKTELKSQAYFPVGLCL

SEQ ID NO: 4166 - protein, 34 aa, Homo sapiens
GLVVLFLPSSLALLLKSHRLRMRRAVKDTSSAAF

SEQ ID NO: 4167 - protein, 42 aa, Homo sapiens
MCGVCLCLLPRTITSFPFSHITALLAAAVVCCKSELINPTEY

SEQ ID NO: 4168 - protein, 100 aa, Homo sapiens
MWHLLVFIVCVFFVYYTLGNFVLPKKKKKGSVMSDTQEKQISVVSLKYNFKGHYQQQGFFYTLKTLCYISLPFSYFGVLLLLYNGINGNVIQPLNCHYYI

SEQ ID NO: 4169 - protein, 41 aa, Homo sapiens
WGCQKWRLQPPRVSSSGAPCFVPPSCAIQRGPPGLAETPPG

SEQ ID NO: 4170 - protein, 3 aa, Homo sapiens
MEM

SEQ ID NO: 4171 - protein, 30 aa, Homo sapiens
MPGVFFFFVFFFNSYFGCALVSQCSFNLHF

SEQ ID NO: 4172 - protein, 60 aa, Homo sapiens
MRSVPAILQMLWILRRSTNWTLYLILHGCPAVVCAWPRQHAPWGMVRLWVPTAAPAALSP

SEQ ID NO: 4173 - protein, 38 aa, Homo sapiens
MEKTLKVLFLFSHPATINTVDFCEMCGVFSPDTKQVLT

SEQ ID NO: 4174 - protein, 21 aa, Homo sapiens
VHKKHSTGTKSFSKPAVFGEH

SEQ ID NO: 4175 - protein, 57 aa, Homo sapiens
MALDSSTLVALLGTAPLLAAFTAGVECLWLFQALSASCPWIDHSGVWRTVALFSQLH

SEQ ID NO: 4176 - protein, 51 aa, Homo sapiens
MAPCCWALWVGSAPWEPASMPGPHSSHSCWSLAPWPLCSSILWVWGRRTSA

SEQ ID NO: 4177 - protein, 35 aa, Homo sapiens
MLAVLSLCNFCRCSLGRELFFRRLAKSQVLSLDLR

SEQ ID NO: 4178 - protein, 186 aa, Homo sapiens
LAGRLPHPGRPAAQLLRVCRTHEAPGGHGPAGLGAAATLPAPARPERLPGPRLCALRRGRLGHGAGALRPARVRGELRQGPGRAQTPRPPSCSPSWASLTSSRGRPRASWRGLGRCGPTPSTSSASPCSSTASRTWRALRRATTAASWSSASSLASPTAWWGPCSSRCSWPSWAPTSSPVPLAWCC

SEQ ID NO: 4179 - protein, 57 aa, Homo sapiens
MTLLLLSLTPHPNAHCCCPKRTYQCVDVSRKVPFLFGLVVLDCFLTSFNFSHFLTDY

SEQ ID NO: 4180 - protein, 23 aa, Homo sapiens
EKSRKVGHSWIYFFFSLINIFPY

SEQ ID NO: 4181 - protein, 453 aa, Homo sapiens
MSIVTVQLGQCGNQIGFEVFDALLSDSHSSQGLCSMRENEAYQASCKERFFSEEENGVPIARAVLVDMEPKVINQTLSKAAQSGQWKYGQHACFCQKQGSGNNWAYGYSVHGPRHEESIMNIIRKEVEKCDSFSGFFIIMSMAGGTGSGLGAFVTQNLEDQYSNSLKMNQIIWPYGTGEVIVQNYNSILTLSHLYRSSDALLLHENDAIHKICAKLMNIKQISFSDINQVLAHQLGSVFQPTYSAESSFHYRRNPLGDLMEHLVPHPEFKMLSVRNIPHMSENSLAYTTFTWAGLLKHLRQMLISNAKMEEGIDRHVWPPLSGLPPLSKMSLNKDLHFNTSIANLVILRGKDVQSADVEGFKDPALYTSWLKPVNAFNVWKTQRAFSKYEKSAVLVSNSQFLVKPLDMIVGKAWNMFASKAYIHQYTKFGIEEEDFLDSFTSLEQVVASYCNL

SEQ ID NO: 4182 - protein, 21 aa, Homo sapiens
MRARPSPSPLRSWACRPPCCC

SEQ ID NO: 4183 - protein, 78 aa, Homo sapiens
MGHLIQRKKVHVFGDELSLVTLFRCIQNMPETLPNNSCYSAGIAKLEEGDELQLAIPRENAQISLDGDVTFFGALKLL

SEQ ID NO: 4184 - protein, 32 aa, Homo sapiens
MTQVTISKLGRLLLLALPLCPISCQYSQFSRE

SEQ ID NO: 4185 - protein, 35 aa, Homo sapiens
MDHFLVFFFLIGALNKYGTWTKRFSGILWKLTFLT

SEQ ID NO: 4186 - protein, 68 aa, Homo sapiens
FFFFFFFKLHGTEFNVNHEMRQKPPPGRWEDPAPNQTLEHAALNQTPGRGCVVMHRLRLRGEDGKTQP

SEQ ID NO: 4187 - protein, 50 aa, Homo sapiens
MAVALETVLIIFSLFGTTLTKLVVLLLHVQKLDILYMQQFSYATMRQEEH

SEQ ID NO: 4188 - protein, 8 aa, Homo sapiens
MKLYFLMC

SEQ ID NO: 4189 - protein, 97 aa, Homo sapiens
RQPCPGLWPPPFYSPCGLGLCSLHDRPALVVGAHRVPTPGLHCGCLRVPADDRLPPGAAPTLQRGRECEAGPCEAQGADLSGQGPSPHSAALALSIH

SEQ ID NO: 4190 - protein, 310 aa, Homo sapiens
  SITE (127): Xaa equals any of the naturally occurring L-amino acids
MVYKTLFALCILTAGWRVQSLPTSAPLSVSLPTNIVPPTTIWTSSPQNTDADTASPSNGTHNNSVLPVTASAPTSLLPKNISIESREEEITSPGSNWEGTNTDPSPSGFSSTSGGVHLTTTLEEHSXGTPEAGVAATLSQSAAEPPTLISPQAPASSPSSLSTSPPEVFSASVTTNHSSTVTSTQPTGAPTAPESPTEESSSDHTPTSHATAEPVPQEKTPPTTVSGKVMCELIDMETTTTFPRVIMQEVEHALSSGSIAAITVTVIAVVLLVFGVAAYLKIRHSSYGRLLDDHDYGSWGNYNNPLYDDS

SEQ ID NO: 4191 - protein, 64 aa, Homo sapiens
MESGQVSLFGLVFSLMPCCQHIQKGAACPKTVNLRRPQLSGLLISWRFLKCILLDFNGWVWKSP

SEQ ID NO: 4192 - protein, 16 aa, Homo sapiens
MALSFIFPSDFCPSFL

SEQ ID NO: 4193 - protein, 16 aa, Homo sapiens
MVVLFLFPITVLALKL

SEQ ID NO: 4194 - protein, 31 aa, Homo sapiens
MSASLNHIKVSSVWLLLLFEMVLCFGCGLKL

SEQ ID NO: 4195 - protein, 39 aa, Homo sapiens
MKEQLAQFLKVTSSFRLLLLLTWMGLGIAPLTLCYTAIT

SEQ ID NO: 4196 - protein, 39 aa, Homo sapiens; identical to SEQ ID NO: 4195

SEQ ID NO: 4197 - protein, 39 aa, Homo sapiens; identical to SEQ ID NO: 4195

SEQ ID NO: 4198 - protein, 35 aa, Homo sapiens
MLRVMNLFHLLFEIATCLICLSISSKNSGENSMIE

SEQ ID NO: 4199 - protein, 37 aa, Homo sapiens
MLDFLRSQLKLLSYLLLGFLLLRQRGIGRTSEIFVNS

SEQ ID NO: 4200 - protein, 23 aa, Homo sapiens
MSQACLQLAMLSPSPLPGGTTAK

SEQ ID NO: 4201 - protein, 310 aa, Homo sapiens
  SITE (307): Xaa equals any of the naturally occurring L-amino acids
MMFLAVGIYALFVSTNYWERYYTLVPSAVALGMAIVPLWASMGNYITRMAQKYHEYSHYKEQDGQGMKQRPPRGSHAPYLLVFQAIFYSFFHLSFACAQLPMIYFLNHYLYDLNHTLYNVQSCGTNSHGILSGFNKTVLRTLPRSGNLIVVESVLMAVAFLAMLLVLGLCGPLTGPRRRSICAAWAGATSSSCPSSTCVTTACATSCLSLSTAASRCSLPALVSPWAMACARWGWSGWLTSSWLTAWAPQPPHSWACWACGCHARCPWWPEQGCTCCSPSSSFSGPLCLGSCNTAGSSMWQLPFGVXAVP

SEQ ID NO: 4202 - protein, 310 aa, Homo sapiens
MMFLAVGIYALFVSTNYWERYYTLVPSAVALGMAIVPLWASMGNYITRMAQKYHEYSHYKEQDGQGMKQRPPRGSHAPYLLVFQAIFYSFFHLSFACAQLPMIYFLNHYLYDLNHTLYNVQSCGTNSHGILSGFNKTVLRTLPRSGNLIVVESVLMAVAFLAMLLVLGLCGPLTGPRRRSICAAWAGATSSSCPSSTCVTTACATSCLSLSTAASRCSLPALVSPWAMACARWGWSGWLTSSWLTAWAPQPPHSWACWACGCHARCPWWPEQGCTCCSPSSSFSGPLCLGSCNTAGSSMWQLPFGVWAVP

SEQ ID NO: 4203 - protein, 370 aa, Homo sapiens
  SITE (370): Xaa equals any of the naturally occurring L-amino acids
MMFLAVGIYALFVSTNYWERYYTLVPSAVALGMAIVPLWASMGNYITRMAQKYHEYSHYKEQDGQGMKQRPPRGSHAPYLLVFQAIFYSFFHLSFACAQLPMIYFLNHYLYDLNHTLYNVQSCGTNSHGILSGFNKTVLRTLPRSGNLIVVESVLMAVAFLAMLLVLGLCGAAYRPTEEIDLRSVGWGNIFQLPFKHVRDYRLRHLVPFFIYSGFEVLFACTGIALGYGVCSVGLERLAYLLVAYSLGASAASLLGLLGLWLPRPVPLVAGAGVHLLLTFILFFWAPVPRVLQHSWILYVAAALWGVGSALNKTGLSTLLGILYEDKERQDFIFTIYHWWQAVAIFTVYLGSSLHMKAKLAVLLVTLVAX

SEQ ID NO: 4204 - protein, 137 aa, Homo sapiens
  SITE (54): Xaa equals any of the naturally occurring L-amino acids
MVSVCFYFIRDYFWWLLTYTFFALMLQFLVMLTKCGFSFLKSCLGFIVFGFCEXFSHKIWKNSAFSSSVTAFCFCPPSFAILIERRPFYSLSCLLTSFFCFPFLCLSVLPSDYFIRTICQFPNSLFGFVSSVIRNIY

SEQ ID NO: 4205 - protein, 10 aa, Homo sapiens
MIQCCIMILL

SEQ ID NO: 4206 - protein, 39 aa, Homo sapiens [sequence omitted]

SEQ ID NO: 4207 - protein, 50 aa, Homo sapiens
MFLSSNFPIFSILFFAFPYFCLPVFHFKLLSSPNCFILPLPINLSIFVCV

SEQ ID NO: 4208 - protein, 50 aa, Homo sapiens
MFLPSNFPIFSILFFAFPYFCLPVFHFKLLSSPNCFILPLPINLSIFVCV

SEQ ID NO: 4209 - protein, 32 aa, Homo sapiens
MAKIHVMSINLYFLSPALLSMAMGLTPEGCKS

SEQ ID NO: 4210 - protein, 55 aa, Homo sapiens
MHAHIWPYLYMCAHIHMHLCTYMPIHTHTHTHAHTHQPQSHSFCGGTSGLRAAPG

SEQ ID NO: 4211 - protein, 23 aa, Homo sapiens
MAPIMRLLEAIFMTAIVPSVLQL

SEQ ID NO: 4212 - protein, 49 aa, Homo sapiens
HLPCKLVFFLSDKFWYCRLSPNHKVLHYGDLEESPQGEVPHDSLQDKRK

SEQ ID NO: 4213 - protein, 29 aa, Homo sapiens
VIVIVQLCIFYASYSAWHIVGAQLTLLKE

SEQ ID NO: 4214 - protein, 126 aa, Homo sapiens [sequence omitted]

SEQ ID NO: 4215 - protein, 52 aa, Homo sapiens
MHTACLCNAIIALLKVPLSFQRYFFPETTVYQHQACSVTIAPESCRAHCCPE

SEQ ID NO: 4216 - protein, 50 aa, Homo sapiens
MVSCLLRTARQHCVCEDVLHLLLCASQLLLLKQLSLLFGFLRLLASERHL

SEQ ID NO: 4217 - protein, 37 aa, Homo sapiens
MKRRERRWKWFFFFFFYFLSFFFFFFLVNSRFSSSKF

SEQ ID NO: 4218 - protein, 34 aa, Homo sapiens
MKNIIAISPKFLSWLGWGRFLLWTISGTYSMKSR

SEQ ID NO: 4219 - protein, 37 aa, Homo sapiens
MLCSLLLLFLLLFVIPKSPWQHTSGWFATCSERLIKN

SEQ ID NO: 4220 - protein, 75 aa, Homo sapiens
MQMLRKLFTAIRALFLAVCVLKVIVSLVSLGVGLRNLCGQSSQPLNEEGSEKRLLGENSVPPSPSREQTSTAIVL

SEQ ID NO: 4221 - protein, 35 aa, Homo sapiens
MLHLCSLLQGVLGKCRYVYYGKNSEGNRFIRDDQL

SEQ ID NO: 4222 - protein, 25 aa, Homo sapiens
FQCPCVHVSALQELAAGVLGGPRPV

SEQ ID NO: 4223 - protein, 9 aa, Homo sapiens
MHSCRNHDR

SEQ ID NO: 4224 - protein, 37 aa, Homo sapiens
MRFHILLIVLLLRMKNQQQILCWTCGLVKLLFLVLPV

SEQ ID NO: 4225 - protein, 36 aa, Homo sapiens
  SITE (16): Xaa equals any of the naturally occurring L-amino acids
  SITE (33): Xaa equals any of the naturally occurring L-amino acids
MRGLFFFSLLDKVLAXCNCLLSYSTAEMKQSFXCTD

SEQ ID NO: 4226 - protein, 31 aa, Homo sapiens
MDLQVCMGSKYWFMVLFLELLVGLYFGVVFG

SEQ ID NO: 4227 - protein, 85 aa, Homo sapiens
MPRSGPLSIPWPLWLPLGYVVCVREWCAGAVPYAPCVLCVSRHGSLRPMCAVCVLPVYVASSDADKVGNNPCQSGLGPDFVLFLT

SEQ ID NO: 4228 - protein, 207 aa, Homo sapiens [sequence omitted]

SEQ ID NO: 4229 - protein, 33 aa, Homo sapiens
MRYLIFLLLHLSFSWLQKIMAFTVFLFSFMSSF

SEQ ID NO: 4230 - protein, 34 aa, Homo sapiens
MWPIASLTYMGKPLALCSPAFLLCLVHAVSSQQP

SEQ ID NO: 4231 - protein, 31 aa, Homo sapiens
MKLFQYIQYTLSLMLLLLTVISFFFSFLYLH

SEQ ID NO: 4232 - protein, 31 aa, Homo sapiens; identical to SEQ ID NO: 4231

SEQ ID NO: 4233 - protein, 33 aa, Homo sapiens
MYVVTVYMCMSVVYACVSVCLYVCTTKEAAETL

SEQ ID NO: 4234 - protein, 55 aa, Homo sapiens
EILHRFLVLFCSFFVFCCFVIYLYTYKILLKIKKKKKSRSRIHWSRFSYNVLKTK

SEQ ID NO: 4235 - protein, 75 aa, Homo sapiens [sequence omitted]

SEQ ID NO: 4236 - protein, 6 aa, Homo sapiens
LKGIYL

SEQ ID NO: 4237 - protein, 12 aa, Homo sapiens
HETIVTWRPQLL

SEQ ID NO: 4238 - protein, 59 aa, Homo sapiens
MATLLLCPHVAFPLYVRAPATSILRGHQSYWIRVPPQQLHVNIISLKTLPPAGHGSSRL

SEQ ID NO: 4239 - protein, 24 aa, Homo sapiens
MFDLLFISTFILIFLASLDLEVNY

SEQ ID NO: 4240 - protein, 38 aa, Homo sapiens
MVFILTISYLLKGVMVITKAFRMQFLICCGHDHKKISQ

SEQ ID NO: 4241 - protein, 32 aa, Homo sapiens
MSMECFSICYVISDFFVQCFVTFIVEILYLPG

SEQ ID NO: 4242 - protein, 79 aa, Homo sapiens
MDDFISISLLSLAMLVGCYVAGIIPLAVNFSEERLKLVTVLGAGLLCGLLWQSSCLKEYMPFMKIFLRENTTKQVKHIM

SEQ ID NO: 4243 - protein, 55 aa, Homo sapiens
MTRLSFLGLFLLRPAPSWAHLRFTEVSGGPKSLLVFNFFLTIHFCGQFQQHCPYF

SEQ ID NO: 4244 - protein, 4 aa, Homo sapiens
MQST

SEQ ID NO: 4245 - protein, 30 aa, Homo sapiens
MYIRLFLIFCYLYAHCSEHSLYICPCSVVS

SEQ ID NO: 4246 - protein, 20 aa, Homo sapiens
MFLIFYLAKLDNLSLGKIKN

SEQ ID NO: 4247 - protein, 59 aa, Homo sapiens
STLFSILLSRLWGSFCQGQATRKVEVEITWYVSLWVPQLELPQLRKKMRHNDLECNWSK

SEQ ID NO: 4248 - protein, 30 aa, Homo sapiens
MLALNIFFLSLTSAINSTIGLQIQFTLGLN

SEQ ID NO: 4249 - protein, 34 aa, Homo sapiens
MESIYCRTTLVLCLLSLPSALQLSPSLAASSLCS

SEQ ID NO: 4250 - protein, 44 aa, Homo sapiens
MTRHLLIIFHDCFLFSHCVGFVNLYITGNKILCKIYWGKSIWSA

SEQ ID NO: 4251 - protein, 16 aa, Homo sapiens
MLQRIVLACCWPAASQ

SEQ ID NO: 4252 - protein, 68 aa, Homo sapiens
MDFHFLVVFFFSYHFPFLFLHVGNLSSAAFLCQLKGKSHLNAHQENTLWSAIQSFIMYPLTVMPARRD

SEQ ID NO: 4253 - protein, 38 aa, Homo sapiens
MKKMSQRSGTLWLALLLHSVVTTGVIGDIMWAKNISGL

SEQ ID NO: 4254 - protein, 29 aa, Homo sapiens
MLIWGSHLLPLGQSTIKLLYLPWLLDHVC

SEQ ID NO: 4255 - protein, 10 aa, Homo sapiens
MLNCDHFLAL

SEQ ID NO: 4256 - protein, 31 aa, Homo sapiens
MGINTRELFLNFTIVLITVILMWLLVRSYQY

SEQ ID NO: 4257 - protein, 36 aa, Homo sapiens
MKTTSFYCIFTRVHSGRMLIAGSVQATDMLLLVIQY

SEQ ID NO: 4258 - protein, 42 aa, Homo sapiens
MVMFVLCLNYWDLVLTISLKKTAFCHFKLTTSGRWRIRSASQ

SEQ ID NO: 4259 - protein, 23 aa, Homo sapiens
LPLSLFSVLLTLLFLVVFKKIAT

SEQ ID NO: 4260 - protein, 14 aa, Homo sapiens
MLLIWVFLPVLTTD

SEQ ID NO: 4261 - protein, 118 aa, Homo sapiens
  SITE (109): Xaa equals any of the naturally occurring L-amino acids
  SITE (115): Xaa equals any of the naturally occurring L-amino acids
MAHGLYSILIGLGLLTGLLLLHNWSPCFQFLPSISSNLTPKVILSSLKKKKKNSRGGPVPNSPYSESYYNSLAVVLQRRDWENPGVTQLNRLAAHPPFASWRNSEEARXDRPSQXLRT

SEQ ID NO: 4262 - protein, 35 aa, Homo sapiens
PLELTSWTLLLYCLNCSALYFASVCEFCCFWGISL

SEQ ID NO: 4263 - protein, 1 aa, Homo sapiens
M

SEQ ID NO: 4264 - protein, 23 aa, Homo sapiens
MILLIIPSFRLSPFSSSTIKEPL

SEQ ID NO: 4265 - protein, 113 aa, Homo sapiens
MSFCFQLLLGVAMSQPQSLISPVSITNCLHLKAFLYLLIFPQAFPFLSCIFPLFWQTCMGKDVTLHVSASNPAMLLYQKFGFKTEEYVLDFYDKYYPLESTECKHAFFLRLRR

SEQ ID NO: 4266 - protein, 42 aa, Homo sapiens
MSNYTILGQYCVFLVLCFLRSPTYWNFDYLDIFVFKRGGEFA

SEQ ID NO: 4267 - protein, 10 aa, Homo sapiens
EFTFPCAGLT

SEQ ID NO: 4268 - protein, 23 aa, Homo sapiens
MSVLLLSSSCGAAFAVLCPPHCE

SEQ ID NO: 4269 - protein, 13 aa, Homo sapiens
MGCFGLWAPSFPW

SEQ ID NO: 4270 - protein, 86 aa, Homo sapiens
MLMLLTLFSSLGMFGTGGLGGRVFCPHTHTDSEYLIHVVDSPITVQWGRGPRFFPFLSPFISCGQRLQPTIALRVPSSAFSKYGLT

SEQ ID NO: 4271 - protein, 35 aa, Homo sapiens
  SITE (9): Xaa equals any of the naturally occurring L-amino acids
MFVYCPHLXLIYSGILLLLEHIVYSCNNYFNIFAY

SEQ ID NO: 4272 - protein, 17 aa, Homo sapiens
RGRPGALPSCLFSVFPL

SEQ ID NO: 4273 - protein, 25 aa, Homo sapiens
MQVLLLLVGFFQMELSLFILKNMKI

SEQ ID NO: 4274 - protein, 18 aa, Homo sapiens
MTNLLFAYSSILNKSLKL

SEQ ID NO: 4275 - protein, 118 aa, Homo sapiens
  SITE (34): Xaa equals any of the naturally occurring L-amino acids
  SITE (52): Xaa equals any of the naturally occurring L-amino acids
MGLVICSFLALKIVVSKRDHGRNHCNGSNSNTCXLYCALGLPGVSKYISIFXMCRTRYLGTCHTPLSRYVLASLELKGLELRTCSLFFIHMSLVGLHPDHTMTSYRARENNIIISSFA

SEQ ID NO: 4276 - protein, 14 aa, Homo sapiens
LTWLLLPHRAARSQ

SEQ ID NO: 4277 - protein, 380 aa, Homo sapiens
MRISPWWYFAMISVSGVFSVTFSVIFAYVADVTQEHERSTAYGWVSATFAASLVSSPAIGAYLSASYGDSLVVLVATVVALLDICFILVAVPESLPEKMRPVSWGAQISWKQADPFASLKKVGKDSTVLLICITVFLSYLPEAGQYSSFFLYLRQVIGFGSVKIAAFIAMVGILSIVAQTAFLSILMRSLGNKNTVLLGLGFQMLQLAWYGFGSQAWMMWAAGTVAAMSSITFPAISALVSRNAESDQQGVAQGIITGIRGLCNGLGPALYGFIFYMFHVELTELGPKLNSNNVPLQGAVIPGPPFLFGACIVLMSFLVALFIPEYSKASGVQKHSNSSSGSLTNTPERGSDEDIEPLLQDSSIWELSSFEEPGNQCTEL

SEQ ID NO: 4278 - protein, 11 aa, Homo sapiens
MRWNLLLVKLL

SEQ ID NO: 4279 - protein, 31 aa, Homo sapiens
MFVFTIYCIVGLFTFGHSSMKCKLFQESHEK

SEQ ID NO: 4280 - protein, 28 aa, Homo sapiens
MAFSFPASAGVVRVGARRALLFPFLLPG

SEQ ID NO: 4281 - protein, 105 aa, Homo sapiens
MAHKIGPPMLFFFLSLFNYLLRLSKAKGNCEIKSVKYNNIFKRKWIPLFLFATEKAPRRHRLCRISKQTMMEWRPVQPFKERQVEQPGERPGGEESETPESKAVF

SEQ ID NO: 4282 - protein, 22 aa, Homo sapiens
EVQYVQIFHIFLLLSLYLFSLF

SEQ ID NO: 4283 - protein, 39 aa, Homo sapiens
MTIIMCPLAPLISGVCAIPLSTSLIFLTPSLTKSLQKPL

SEQ ID NO: 4284 - protein, 28 aa, Homo sapiens
MRSLICPNPHQRLLFSVLLIITILMGMN

SEQ ID NO: 4285 - protein, 36 aa, Homo sapiens
  SITE (25): Xaa equals any of the naturally occurring L-amino acids
  SITE (31): Xaa equals any of the naturally occurring L-amino acids
MLRKVILCMLPFCFILLLKQNCGVXLCVCAXPRCPS

SEQ ID NO: 4286 - protein, 22 aa, Homo sapiens
MNVFSKNVKCIYFLYLYSCFIF

SEQ ID NO: 4287 - protein, 32 aa, Homo sapiens
MILFLLLLWSCISSVRSHGYLQIKAPINQMHL

SEQ ID NO: 4288 - protein, 38 aa, Homo sapiens
MPSPEKNFYHLLLPFLLALLKALKCDSSSIASTSMYNF

SEQ ID NO: 4289 - protein, 21 aa, Homo sapiens
MILFFHFLSTYVEASLPKHNL

SEQ ID NO: 4290 - protein, 71 aa, Homo sapiens
MASWETFKRPSLILSAYSNSITGITDDVSIGLASTSTVTRCLLSPKVLSKVSVARTEFRMVSRYATWRGPR

SEQ ID NO: 4291 - protein, 145 aa, Homo sapiens
  SITE (85): Xaa equals any of the naturally occurring L-amino acids
QVVGMTVEHVECQDAGVREAPGPLEGAGEAGGEEADEKPPQFVCRECKETFSTMTLLRRHERSHPELRPFPCTQCGKSFSDRAGXRKHSRTHSSVRPYTCPHCPKAFLSASDLRKHERTHPVPMGTPTPLEPLVALLGMPEEGPA

SEQ ID NO: 4292 - protein, 32 aa, Homo sapiens
MNLPSVNLGFRCFYLFIDFCFPSSIFFCTEFT

SEQ ID NO: 4293 - protein, 117 aa, Homo sapiens [sequence omitted]

SEQ ID NO: 4294 - protein, 30 aa, Homo sapiens
  SITE (28): Xaa equals any of the naturally occurring L-amino acids
MRLFSQMLKSWMALFMRNVWLEMTIATXIQ

SEQ ID NO: 4295 - protein, 50 aa, Homo sapiens
MFSLIILLVKYDIPKENHFNLSSLLTKNTWLKKYSLHLYEHLPYNIPAII

SEQ ID NO: 4296 - protein, 14 aa, Homo sapiens
MKDGSRSLPQLSIC

SEQ ID NO: 4297 - protein, 37 aa, Homo sapiens
MPVVFVLFSLFLTCVHDSFDSASKSKSCVVTGAFIYL

SEQ ID NO: 4298 - protein, 56 aa, Homo sapiens
MLHLTPLKLPFCCWEESGASLSSCTAIPMLVGAALPLVPGVASAQSQRAGSRVLHR

SEQ ID NO: 4299 - protein, 90 aa, Homo sapiens
MTSPHFQLSSSLFMWLCWGWMAEVGWTDGYKRICESIEGVTKSLRDKRGNRTFQKVVLLLSQTLYIHVYFCKLLSPFGQTTITRVKSYQE

SEQ ID NO: 4300 - protein, 37 aa, Homo sapiens
MRKGIHYITFLVSLCSLFHFYQTEGVNFLTRNLKDRN

SEQ ID NO: 4301 - protein, 6 aa, Homo sapiens
MCHVTT

SEQ ID NO: 4302 - protein, 32 aa, Homo sapiens
MSDPLLRITLGLWGMWLFCGRQAHLGFLWRGR

SEQ ID NO: 4303 - protein, 13 aa, Homo sapiens
MASLGQILFWSII

SEQ ID NO: 4304 - protein, 35 aa, Homo sapiens
MVCLPVHSRALLTGFLFFKMLCCKILSYLLFPGTV

SEQ ID NO: 4305 - protein, 62 aa, Homo sapiens
MGLSAASQICGLCLLWLSPHFASQICPPVHILPTSNPGSVSASQRTWTKALAVSGLVDPSTS

SEQ ID NO: 4306 - protein, 28 aa, Homo sapiens
MTFFLLWFICILLVLFQKNSIEMRHRYQ

SEQ ID NO: 4307 - protein, 74 aa, Homo sapiens [sequence omitted]

SEQ ID NO: 4308 - protein, 18 aa, Homo sapiens
MCIQLLLLLLVWGRGLES

SEQ ID NO: 4309 - protein, 30 aa, Homo sapiens
MLISLSLSLSLLTKVYQRPQAQGLSQVKAG

SEQ ID NO: 4310 - protein, 26 aa, Homo sapiens
NFKHQFTMLIKSTFIFSSELNNPINK

SEQ ID NO: 4311 - protein, 20 aa, Homo sapiens
MYKSCGFLCFYDKSGIVFLN

SEQ ID NO: 4312 - protein, 34 aa, Homo sapiens [sequence omitted]

SEQ ID NO: 4313 - protein, 16 aa, Homo sapiens
MWIGVVLSIWKLLLEI

SEQ ID NO: 4314 - protein, 27 aa, Homo sapiens
MATLTFSLRKPLQRSLIRPSRLPLCCF

SEQ ID NO: 4315 - protein, 68 aa, Homo sapiens
MSCYFLLCLSLLQPHWPSYCSINMPGTFLPQGLCTSHAFCSSRFLQSSFPTSFMSLLVHLLMRLSYHV

SEQ ID NO: 4316 - protein, 12 aa, Homo sapiens
MWRHTELPPVYV

SEQ ID NO: 4317 - protein, 44 aa, Homo sapiens
MIFPLQEFSLFGQWWLQVFLEGIIFIPTILLYVHTCVPSNSHSI

SEQ ID NO: 4318 - protein, 6 aa, Homo sapiens
EIPYKE

SEQ ID NO: 4319 - protein, 26 aa, Homo sapiens
MEPGFDLSHSCFGVCPLNTLYGVSNL

SEQ ID NO: 4320 - protein, 30 aa, Homo sapiens
MGNLFFLALLVNLWVYPVATLRISIINKTQ

SEQ ID NO: 4321 - protein, 5 aa, Homo sapiens
MPKIL

SEQ ID NO: 4322 - protein, 5 aa, Homo sapiens
MPKIL

SEQ ID NO: 4323 - protein, 6 aa, Homo sapiens
MFQGQW

SEQ ID NO: 4324 - protein, 31 aa, Homo sapiens
MTFCFCIGFTVIQFSSLISSKTKSECTRFFR

SEQ ID NO: 4325 - protein, 109 aa, Homo sapiens
MVFLPAHSQPFLFPFLFFFSPHTFLGLPPWKEEGLTWVLSSPQVRRVTRAPSLWTWALPEPLPQLPQLRPAGPGHGLRKSPAPNPGRNWPLLGSLFDFFRKMISISFQP

SEQ ID NO: 4326 - protein, 19 aa, Homo sapiens
MLEYGLLLLVILVLFPSFP

SEQ ID NO: 4327 - protein, 26 aa, Homo sapiens
MHPDLWPDCGLWLPQAFSSLHWVFLH

SEQ ID NO: 4328 - protein, 36 aa, Homo sapiens
MIRYWGFGGTQTLAILCVPLDQSPKRRGAGRKEWGS

SEQ ID NO: 4329 - protein, 63 aa, Homo sapiens
MFYILFICLGSRVLNLERSTSIETYGSCSLESQWRLIAVLHMNSNLTLNHQQTLSFHQDVDKE

SEQ ID NO: 4330 - protein, 5 aa, Homo sapiens
SYCSV

SEQ ID NO: 4331 - protein, 30 aa, Homo sapiens
MKLEAFIDFCCFLVVLTWIQVVLIHLFCLK

SEQ ID NO: 4332 - protein, 10 aa, Homo sapiens
MLLLDSDVWF

SEQ ID NO: 4333 - protein, 14 aa, Homo sapiens
MPWLQQLVSFGLMS

SEQ ID NO: 4334 - protein, 41 aa, Homo sapiens
ESLLLVIAFLFFCSFSFPSIKDLLYAFRKITKAECLLTIYG

SEQ ID NO: 4335 - protein, 15 aa, Homo sapiens
KNCYPKGFLRANCLL

SEQ ID NO: 4336 - protein, 15 aa, Homo sapiens
MTQGIIFLVCILDVL

SEQ ID NO: 4337 - protein, 40 aa, Homo sapiens
MKSTNFLKQALFFFFWKTCVVCPVYLFLMRRPAFCGPREH

SEQ ID NO: 4338 - protein, 53 aa, Homo sapiens
MGSSTFILFFSFLLFSPFLSPSPTTSLYFFFIYSRLIFSAKRCLGPLTSQEAL

SEQ ID NO: 4339 - protein, 11 aa, Homo sapiens
MHFHADYMHGC

SEQ ID NO: 4340 - protein, 37 aa, Homo sapiens
NSLKTIIFALKTVVFLDLPVYAHSLLWHLYSYCNAYS

SEQ ID NO: 4341 - protein, 55 aa, Homo sapiens
MTFSPALPPLRSPCSELLLWRYPGSLIPEALRLLRLGDTPSPPYPATPAGDIMEL

SEQ ID NO: 4342 - protein, 19 aa, Homo sapiens
GMLHDGQLLPSLVIIHCSC

SEQ ID NO: 4343 - protein, 29 aa, Homo sapiens
LELLVCNYVYGNGVVFMICIYIIIWMYIY

SEQ ID NO: 4344 - protein, 50 aa, Homo sapiens
WPLLPQVLQERVWWAHLQSQLLGKLQGLLEPRKSQLAGHLELPKNTLSRK

SEQ ID NO: 4345 - protein, 62 aa, Homo sapiens
MFLGSLGICRFALWILTVFKVLMISQSFFLTSEKKMHCFLIFPMQNQNKKLILCFKKKKKNS

SEQ ID NO: 4346 - protein, 40 aa, Homo sapiens
MKGVLLINLLYYLDTFVYSLQPTCIRGIGVGLNHQHYFIK

SEQ ID NO: 4347 - protein, 142 aa, Homo sapiens [sequence omitted]

SEQ ID NO: 4348 - protein, 43 aa, Homo sapiens
MMLLNSIQVLLYVPIVFRFLTDCCGCTSLSDCSLIYCRTLGCF

SEQ ID NO: 4349 - protein, 36 aa, Homo sapiens
MCILFCTPISLFLCWLPGPSLEPWVERLLKDHHRQP

SEQ ID NO: 4350 - protein, 81 aa, Homo sapiens [sequence omitted]

SEQ ID NO: 4351 - protein, 7 aa, Homo sapiens
MTIFEPS

SEQ ID NO: 4352 - protein, 51 aa, Homo sapiens [sequence omitted]

SEQ ID NO: 4353 - protein, 40 aa, Homo sapiens [sequence omitted]

SEQ ID NO: 4354 - protein, 17 aa, Homo sapiens
MSTGHGACLVSLPVVQA

SEQ ID NO: 4355 - protein, 41 aa, Homo sapiens
MRTLLFLSLAFKACHNLVTPLIPVSSSIFPATHRFPVFTIS

SEQ ID NO: 4356 - protein, 7 aa, Homo sapiens
MICLALY

SEQ ID NO: 4357 - protein, 57 aa, Homo sapiens
  SITE (39): Xaa equals any of the naturally occurring L-amino acids
MTGLYAVGRGAWTAGLCAVGWGGLDVWLLCGAGAGLGPXGRLEGQPGPVVSLVRNRK

SEQ ID NO: 4358 - protein, 52 aa, Homo sapiens
MPAVSAFFSLAALAEVAAMENVHRGQRSTPLTHDGQPKEMPQLPVLISCADQ

SEQ ID NO: 4359 - protein, 38 aa, Homo sapiens
MLITLIIVVGTFCSWVQAYFTHIWLLCLFWKTAASWSD

SEQ ID NO: 4360 - protein, 22 aa, Homo sapiens
MKFVLFYLCTGYPLFWECFFIL

SEQ ID NO: 4361 - protein, 15 aa, Homo sapiens
DTIVLSGCLCLCYYV

SEQ ID NO: 4362 - protein, 10 aa, Homo sapiens
MGTSSILQMK

SEQ ID NO: 4363 - protein, 43 aa, Homo sapiens
MVCGEWVPGMLRALRAALFLFIAISVKLSFLGNVHRLATADVL

SEQ ID NO: 4364 - protein, 68 aa, Homo sapiens
KLWQTMCDAFFCIGCSHWIAGSGYCVIVAALGLAEGPLCLDSLGQWNYTFAQHRGPVPSGYLHMVRVH

SEQ ID NO: 4365 - protein, 26 aa, Homo sapiens
MALTGAFIVKSYSRGWSCGCVCSVPI

SEQ ID NO: 4366 - protein, 10 aa, Homo sapiens
MLWIFKWQVL

SEQ ID NO: 4367 - protein, 218 aa, Homo sapiens
MGMWSIGAGALGAAALALLLANTDVFLSKPQKAALEYLEDIDLKTLEKEPRTFKAKELWEKNGAVIMAVRRPGCFLCREEAADLSSLKSMLDQLGVPLYAVVKEHIRTEVKDFQPYFKGEIFLDEKKKFYGPQRRKMMFMGFIRLGVWYNFFRAWNGGFSGNLEGEGFILGGVFVVGSGKQGILLEHREKEFGDKVNLLSVLEAAKMIKPQTLASEKK

SEQ ID NO: 4368 - protein, 195 aa, Homo sapiens
MGMWSIGAGALGAAALALLLANTDVFLSKPQKAALEYLEDIDLKTLEKEPRTFKAKELWEKNGAVIMAVRRPGCFLCREEAADLSSLKSMLDQLGVPLYAVVKEHIRTEVKDFQPYFKGEIFLDEKKKFYGPQRRKMMFMGFIRLGVWYNFFRAWNGGFSGNLEGEGSSLGEFSWWDQESRAFFLSTEKKNLGTK

SEQ ID NO: 4369 - protein, 21 aa, Homo sapiens
MSWILFLLALVEHIFPLQSSG

SEQ ID NO: 4370 - protein, 18 aa, Homo sapiens
GRSYVKNQVFCGIFYRNR

SEQ ID NO: 4371 - protein, 41 aa, Homo sapiens
MKCFLLLCCAIVLCFSKHCKNSIFGLVFWIIYYNLRSVLLM

SEQ ID NO: 4372 - protein, 21 aa, Homo sapiens
MFIYLAVFVYLLELWSQLPGT

SEQ ID NO: 4373 - protein, 29 aa, Homo sapiens
MSKPKKYTIVLVLLPYREAIQTVGMNLSY

SEQ ID NO: 4374 - protein, 45 aa, Homo sapiens
MVTSGMLVFSIKTFSSKAFLAVVSFILVVSIKCSEGADTSRKGFS

SEQ ID NO: 4375 - protein, 38 aa, Homo sapiens
MSALLEILALLLHSVSGPGMGVFRSSPSFPGAATWLFG

SEQ ID NO: 4376 - protein, 38 aa, Homo sapiens; identical to SEQ ID NO: 4375

SEQ ID NO: 4377 - protein, 30 aa, Homo sapiens
MRFFCSLMFFGYGYGICRLGGKELKITGAG

SEQ ID NO: 4378 - protein, 35 aa, Homo sapiens
MNNLLILFLKTSCLCFLICVCIFKHFVRLSATLGS

SEQ ID NO: 4379 - protein, 78 aa, Homo sapiens
MYIALSSVHALILCGFQFISCVRGQWTECSDFSPPITVILLIFLCLEGLLFFTFTGSYVWHPNPLHMQRRDGDRAIEK

SEQ ID NO: 4380 - protein, 8 aa, Homo sapiens
MLASGEYI

SEQ ID NO: 4381 - protein, 34 aa, Homo sapiens
MNVFFFPCWSLIFMIVFQFLDLTSCMRSTESTQE

SEQ ID NO: 4382 - protein, 76 aa, Homo sapiens
MKKHVLVAHFHYLINSYFGLRTEEMGEQPKTNDTVSIEKIPPPDKYYCKKCNAQCQQPGCVNVSHFDIRHTQRFGE

SEQ ID NO: 4383 - protein, 12 aa, Homo sapiens
MNGRRLIFPYVL

SEQ ID NO: 4384 - protein, 49 aa, Homo sapiens [sequence omitted]

SEQ ID NO: 4385 - protein, 20 aa, Homo sapiens
MFSWKLLYSLILHGLALNCL

SEQ ID NO: 4386 - protein, 30 aa, Homo sapiens
MFVLLFSEIFLSTVAGKLRSGPCAACLLLP

SEQ ID NO: 4387 - protein, 34 aa, Homo sapiens
MTRDDTLSLWLGLVILINCLYLYLTETSLKMPLY

SEQ ID NO: 4388 - protein, 28 aa, Homo sapiens
ILSTGFCFLLFLFVLRKGKKSQVCLTIQ

SEQ ID NO: 4389 - protein, 37 aa, Homo sapiens
MSFSLSLTTQYLCVSLSLVMKCLSLWPVSHCLYICFP

SEQ ID NO: 4390 - protein, 31 aa, Homo sapiens
MHRKFCIFTLLLVFSRSESEHLPFLAAAGAL

SEQ ID NO: 4391 - protein, 73 aa, Homo sapiens
MTVLLLLIPLSKREPFSKSFDGKSSGIHFAVLIGLLLTFCFLILKSCKGHPFLFSSQCRDYTDKVKFPGASVL

SEQ ID NO: 4392 - protein, 41 aa, Homo sapiens
  SITE (30): Xaa equals any of the naturally occurring L-amino acids
  SITE (35): Xaa equals any of the naturally occurring L-amino acids
MLLVLTVFSFHKHCSGKLVLCAAGPFAYVXTINQXLNLKKK

SEQ ID NO: 4393 - protein, 8 aa, Homo sapiens
  SITE (2): Xaa equals any of the naturally occurring L-amino acids
  SITE (7): Xaa equals any of the naturally occurring L-amino acids
  SITE (8): Xaa equals any of the naturally occurring L-amino acids
VXPCGCXX

SEQ ID NO: 4394 - protein, 40 aa, Homo sapiens
  SITE (3): Xaa equals any of the naturally occurring L-amino acids
  SITE (27): Xaa equals any of the naturally occurring L-amino acids
  SITE (29): Xaa equals any of the naturally occurring L-amino acids
  SITE (33): Xaa equals any of the naturally occurring L-amino acids
  SITE (35): Xaa equals any of the naturally occurring L-amino acids
MLXLRLTIVIIHISVSADLSLQYFFSXLXNFLXLXVKPKC

SEQ ID NO: 4395 - protein, 37 aa, Homo sapiens
MKEMNDFCQSLFIQSSHSVNCFLIRSASARTVLTSII

SEQ ID NO: 4396 - protein, 91 aa, Homo sapiens
  SITE (13): Xaa equals any of the naturally occurring L-amino acids
  SITE (40): Xaa equals any of the naturally occurring L-amino acids
MEKTLFLYHYLPXLTFQILLLPVVLQHISDHLCRSQLQRXIFSALVVAWYSSACHVSNTLRPLTYGDKSLSPHELKALRWKDSWDILIRKH

SEQ ID NO: 4397 - protein, 361 aa, Homo sapiens
TRPDSLNELQTTVEGQGADLADLGATKDRIISEINRLQQEATEHATESEERFRGLEEGQAQAGQCPSLEGRLGRLEGVCERLDTVAGGLQGLREGLSRHVAGLWAGLRETNTTSQMQAALLEKLVGGQAGLGRRLGALNSSLQLLEDRLHQLSLKDLTGPAGEAGPPGPPGLQGPPGPAGPPGSPGKDGQEGPIGPPGPQGEQGVEGAPAAPVPQVAFSAALSLPRSEPGTVPFDRVLLNDGGYYDPETGVFTAPLAGRYLLSAVLTGHRHEKVEAVLSRSNQGVARVDSGGYEPEGLENKPVAESQPSPGTLGVFSLILPLQAGDTVCVDLVMGQLAHSEEPLTIFSGALLYGDPELEHA

SEQ ID NO: 4398 - protein, 43 aa, Homo sapiens
FSYCLRVISLCKPLSFVLVFFSIMKLWYCTRSVVRCSLVSGLV

SEQ ID NO: 4399 - protein, 38 aa, Homo sapiens
MANLAALSLCFLLFSFLPLFPTLLSSLQSTTCTPGAPG

SEQ ID NO: 4400 - protein, 19 aa, Homo sapiens
MWLMMQLLSFFVFLCLLYL

SEQ ID NO: 4401 - protein, 19 aa, Homo sapiens
MWLMMQLLSFFVFLCLLYL

SEQ ID NO: 4402 - protein, 19 aa, Homo sapiens
MWLMMQLLSFFVFLCLLYL

SEQ ID NO: 4403 - protein, 134 aa, Homo sapiens
MEMMESQTLLLTLLSVKMENNLAEFERRAEKNLLIMCKEKEKLQKKAHELKRRLLLSQRKRELADVLDAQIEMLSPFEAVATRFKEQYRTFATALDTTRHELPVKSIHLEGDGQQLLDALQLELVTIQRLLGRT

SEQ ID NO: 4404 - protein, 35 aa, Homo sapiens
MPLMSLLVTVHFVVLSKCCANSKPFLKFFALIRVP

SEQ ID NO: 4405 - protein, 24 aa, Homo sapiens
MHINFLFSFYSTYQLHSVCFPKLV

SEQ ID NO: 4406 - protein, 39 aa, Homo sapiens
MDSLAWGGIFELHFLQCASPSQRIQGCHQLLLEGALCLV

SEQ ID NO: 4407 - protein, 12 aa, Homo sapiens
FFHICITICSFS

SEQ ID NO: 4408 - protein, 13 aa, Homo sapiens
MEAEEALLWILLQ

SEQ ID NO: 4409 - protein, 43 aa, Homo sapiens
MVNDSLLYFSFFFFFFLWFSSWIHPLILNQNVRSMNYELKYFS

SEQ ID NO: 4410 - protein, 17 aa, Homo sapiens
GIVLLIGVLVQVSAVDD

SEQ ID NO: 4411 - protein, 74 aa, Homo sapiens
MEQVHPGRTRTRLHCGLEIQGCQRFLLCAFLISWLPGGAPGCHSPLLWPYSIFHSNASLCGRSSDNSSDQDFKI

SEQ ID NO: 4412 - protein, 435 aa, Homo sapiens
MGHNFGMFHDDYSCKCPSTICVMDKALSFYIPTDFSSCSRLSYDKFFEDKLSNCLFNAPLPTDIISTPICGNQLVEMGEDCDCGTSEECTNICCDAKTCKIKATFQCALGECCEKCQFKKAGMVCRPAKDECDLPEMCNGKSGNCPDDRFQVNGFPCHHGKGHCLMGTCPTLQEQCTELWGPGTEVADKSCYNRNEGGSKYGYCRRVDDTLIPCKANDTMCGKLFCQGGSDNLPWKGRIVTFLTCKTFDPEDTSQEIGMVANGTKCGDNKVCINAECVDIEKAYKSTNCSSKCKGHAVCDHELQCQCEEGWIPPDCDDSSVVFHFSIVVGVLFPMAVIFVVVAMVIRHQSSREKQKKDQRPLSTTGTRPHKQKRKPQMVKAVQPQEMSQMKPHVYDLPVEGNEPPASFHKDTNALPPTVFKDNPMSTPKDSNPKA

SEQ ID NO: 4413 - protein, 32 aa, Homo sapiens
MKVLSFLLCIRISFLFVVESIVRGISKLNEVN

SEQ ID NO: 4414 - protein, 32 aa, Homo sapiens; identical to SEQ ID NO: 4413

SEQ ID NO: 4415 - protein, 27 aa, Homo sapiens
MLHIIQKLYPDHLFLFFIVKYLCFIHC

SEQ ID NO: 4416 - protein, 14 aa, Homo sapiens
MGITHEYLCVCVCV

SEQ ID NO: 4417 - protein, 105 aa, Homo sapiens
MWGAFWNTLLCPVSGAEGYRQSMPHKPAHPRDTSTLCPSCMYHWGRNLGSVFTTAAAWSHEFFPSAADSLQGGSSLPPPLLKLQSTGYGSGWFPQGSRYVGGEEN

SEQ ID NO: 4418 - protein, 36 aa, Homo sapiens
MKYSCLKGSYTVFMAILALLLVVCIFYQRKPVFRDG

SEQ ID NO: 4419 - protein, 21 aa, Homo sapiens
VGICLSFTQGWSWSFTCQFCL

SEQ ID NO: 4420 - protein, 29 aa, Homo sapiens
MDSATAPVAAGDCGQWWTLLLCTCCRLFL

SEQ ID NO: 4421 - protein, 30 aa, Homo sapiens
MWGGQRVCWAGFAFPAGATAVLTNEVCCQV

SEQ ID NO: 4422 - protein, 51 aa, Homo sapiens
GCEGLAILLSWVHVSDRNGAAWERSPSFTFSLLPPPPYSKTVPPTEGQGLL

SEQ ID NO: 4423 - protein, 30 aa, Homo sapiens
MIHLGFLLPLSLVWRRRDGIQWTEEFIFQG

SEQ ID NO: 4424 - protein, 30 aa, Homo sapiens
MIIQLVLSLPLFFLCCDSVTEYELVARVLW

SEQ ID NO: 4425 - protein, 6 aa, Homo sapiens
MTYMVA

SEQ ID NO: 4426 - protein, 39 aa, Homo sapiens
MAIEFYVFAFFVLIEIIPSSLSAYLMTPAFQIHRFTFSI

SEQ ID NO: 4427 - protein, 56 aa, Homo sapiens
MPNNLSLFYVFSLSFLSSFIPLIVTAKKMSVPVTLPPLFSLSPALWSGPWSTSNSP

SEQ ID NO: 4428 - protein, 44 aa, Homo sapiens
MHQNVLGRVSWLRIGLFELFQWALGHRGCPLLSGARAWGDEGRG

SEQ ID NO: 4429 - protein, 756 aa, Homo sapiens
ARVHCLKKAVRLDSNNHLYWNALGVVACYSGIGNYALAQHCFIKSIQSEQINAVAWTNLGVLYLTNENIEQAHEAFKMAQSLDPSYLMCWIGQALIAEAVGSYDTMDLFRHTTELNMHTEGALGYAYWVCTTLQDKSNRETELYQYNILQMNAIPAAQVILNKYVERIQNYAPAFTMLGYLNEHLQLKKEAANAYQRAILLLQTAEDQDTYNVAIRNYGRLLCSTGEYDKAIQAFKSTPLEVLEDIIGFALALFMKGLYKESSKAYERALSIVESEQDKAHILTALAITEYKQGKTDVAKTLLFKCSILKEPTTESLQALCALGLAMQDATLSKAALNELLKHIKHKDSNYQRCLLTSAIYALQGRSVAVQKQISKAVHSNPGDPALWSLLSRVVAQYAQRNAKGGVVAGNVAHILDSNHGKKALLYTAVNQLAMGSSSAEDEKNTALKTIQKAALLSPGDPAIWAGLMAACHADDKLALMNNTQPKRIDLYLALLSAVSASIKDEKFFENYNQSLEKWSLSQAVTGLIDTGRISEAETLCTKNLKSNPDQPAVILLLRQVQCKPLPESQKPLPDAVLEELQKTVMSNSTSVPAWQWLAHVYQSQGMMRAAEMCYRKSLQLASQRGSWSGKLSSLLRLALLALKVCMANISNDHWPSLVQEATTEALKLCFCPLAVLLQALLQFKRKMGARETRRLLERVVYQPGYPKSIASTARWYLLRHLYAKDDYELIDVLVNNAKTHGDTRALELNQRLSSQ

SEQ ID NO: 4430 - protein, 81 aa, Homo sapiens
MAARVGAFLKNAWDKEPVLVVSFVVGGLAVILPPLSPYFKYSVMINKATPYNYPAAGEKGHRIELSSHSTQRQSCPGARRS

SEQ ID NO: 4431 - protein, 29 aa, Homo sapiens
MRLQSCSSQTAALLLSFYLPESCASQSPG

SEQ ID NO: 4432 - protein, 39 aa, Homo sapiens
MCTLLIFFLILPHWWLGTWEREQAFLHGPSLGCGEQRPM

SEQ ID NO: 4433 - protein, 39 aa, Homo sapiens; identical to SEQ ID NO: 4432

SEQ ID NO: 4434 - protein, 39 aa, Homo sapiens; identical to SEQ ID NO: 4432

SEQ ID NO: 4435 - protein, 32 aa, Homo sapiens
MHILNVCLYFFILNIIFVPLCFTSNIYLYKCV

SEQ ID NO: 4436 - protein, 10 aa, Homo sapiens
MCCCMRLHCC

SEQ ID NO: 4437 - protein, 92 aa, Homo sapiens
MRRRMRMLALWQQLLHPSGDPEQTQSWSVWKVPSSGGSCRCRSSGTQSSIGTRCSARWAGVVGSRPQHHGCQLPGWTKQGATSPFPRFQSSL

SEQ ID NO: 4438 - protein, 103 aa, Homo sapiens
MLQNSVYVNFLLTGLVAQLACHPQPLLRSFLLNTNMVFQPSVKSLLQVLGSVKNKIENFAASQEDFPALLSKAKKYLIARGKLDWAEGPAAGPAPRRSDPLEP

SEQ ID NO: 4439 - protein, 30 aa, Homo sapiens
MKAVGFVFLFTTILSHILLWAFVVYFKKTV

SEQ ID NO: 4440 - protein, 93 aa, Homo sapiens
MLLIVVSVCTATGAWNWLIDPETQKVSFFTSLWNHPFFTISCITLIGLFFAGIHKRVVAPSIIAARCRTVLAEYNMSCDDTGKLILKPRPHVQ

SEQ ID NO: 4441 - protein, 46 aa, Homo sapiens
MLFRFVFIYLFGPAKLPSLQRPWTRIQPVPLCPTTLHSQRLAMQPT

SEQ ID NO: 4442 - protein, 161 aa, Homo sapiens
MWPGRIMTVTVVLLCCSTASIWPCLSHSASPSRTCPNFVGRSTRSCVTANSLCEPRTPDPKPINGKGDMGVPSQETPVPFLSCLFPLTSLWFFIFKCFNFCIFFSLREYLLISDVQGVATEKPLSSSVCRGVWPCGLGGAVILPLPRAGSRKSVLGVVGGQ

SEQ ID NO: 4443 - protein, 11 aa, Homo sapiens
MSPGGICNCII

SEQ ID NO: 4444 - protein, 57 aa, Homo sapiens
MWLLKPSAHSPVHVLVLLFPRGWSQPGTHKRQILVNAASLPGGCLLPWIWSGAALRF

SEQ ID NO: 4445 - protein, 68 aa, Homo sapiens
ICLRLCLCARHRLGAGALRLRRLWRGSETRGPAGGSLCVSRHCSPSHPGGSLEWVLQLPSWVRSEAGR

SEQ ID NO: 4446 - protein, 3 aa, Homo sapiens
ACV

SEQ ID NO: 4447 - protein, 27 aa, Homo sapiens
MNVIIVLVHALCPWCRGCPHWGPLVPP

SEQ ID NO: 4448 - protein, 34 aa, Homo sapiens
MQVQTTVLLLQADFFRVRAPCGELRAASIRAKPW

SEQ ID NO: 4449 - protein, 50 aa, Homo sapiens
MAQITWIHLLSVVICSAPPRRLHRQHSAVQAWAAHREHVQPSLTSSGRMP

SEQ ID NO: 4450 - protein, 26 aa, Homo sapiens
MRSPPHFIFFFLKCPGLGWGGQPPGV

SEQ ID NO: 4451 - protein, 50 aa, Homo sapiens
MGVRICGVQASCTCVHLCGVWVYLDCGLRLPYRTLLLPPPQGITGPCSSC

SEQ ID NO: 4452 - protein, 27 aa, Homo sapiens
MNIPIYVIGYLFLSSLELCTQTKTISG

SEQ ID NO: 4453 - protein, 12 aa, Homo sapiens
GFLFHLLHFFYF

SEQ ID NO: 4454 - protein, 43 aa, Homo sapiens
MEAFLHLWPDGSLGDWKSFSCHCYWGWAGPTCQEPRPGPKEAV

SEQ ID NO: 4455 - protein, 101 aa, Homo sapiens
MQGSGSQFRACLLCLCFSCPCSPGGPRWNSRQGGRRFPKTCRAISQNLVFKYKTFCPVRYMQPHRSSLCLHFTSYVFILSTWGSLRTYSTDLKKKKKKKKK

SEQ ID NO: 4456 - protein, 21 aa, Homo sapiens
MNTPGLSLFLLRISLLLMCGC

SEQ ID NO: 4457 - protein, 27 aa, Homo sapiens
MTIAIVILIIFPTVKNLALSSEIVMAL

SEQ ID NO: 4458 - protein, 37 aa, Homo sapiens
MFSRLYKQRLLLLLWYSHFGGGGSRLERISFALKSRM

SEQ ID NO: 4459 - protein, 47 aa, Homo sapiens
MMVPGGPAPLLLCFLFLLFWYLGELITKSLLRVMESYPSIPQAVFQR

SEQ ID NO: 4460 - protein, 47 aa, Homo sapiens
MFKDAGLFLLWGPFPGVPVSPSPGGSAPTRVGGISSQRLARPHLGEA

SEQ ID NO: 4461 - protein, 26 aa, Homo sapiens
MTVVLLLLHGITVYYVVGKYSLLNPT

SEQ ID NO: 4462 - protein, 26 aa, Homo sapiens
MTVVLLLLHGITVYYVVGKYSLLNPT

SEQ ID NO: 4463 - protein, 26 aa, Homo sapiens
MTVVLLLLHGITVYYVVGKYSLLNPT

SEQ ID NO: 4464 - protein, 26 aa, Homo sapiens
MTVVLLLLHGITVYYVVGKYSLLNPT

SEQ ID NO: 4465 - protein, 37 aa, Homo sapiens
MGMLFLLLCIHRSLVKANLPTQISKVVAIKTDTSQRK

SEQ ID NO: 4466 - protein, 19 aa, Homo sapiens
MAVFLYFDFCISILIFLVM

SEQ ID NO: 4467 - protein, 90 aa, Homo sapiens
PLLLALLSLALCRGRVVRVPTATLVRVVGTELVIPCNVSDYDGPSEQNFDWSFSSLGSSFVELASTWEVGFPAQHWPFGSIPVGFSEARW

SEQ ID NO: 4468 - protein, 40 aa, Homo sapiens [sequence omitted]

SEQ ID NO: 4469 - protein, 35 aa, Homo sapiens
MGTIRLLQIGLSLPFFTFLLANQSGFRKPFVICEK

SEQ ID NO: 4470 - protein, 32 aa, Homo sapiens
MELMNVRTRLWRVLSVRFLGFIHVVVYDLLPC

SEQ ID NO: 4471 - protein, 34 aa, Homo sapiens
MFTFISMFTFLVTLTCWLNTSNSPVEGSPPGRKG

SEQ ID NO: 4472 - protein, 74 aa, Homo sapiens
MNKTFHPLKHFPVLRFLFVFVVSSPCYPFCPFSLTMVIWSLGSYQSPRDILQSLSPFWVDFILFYFVFFKKITF

SEQ ID NO: 4473 - protein, 24 aa, Homo sapiens
GTRIWGVVCLFLEHRVAWPCWNDK

SEQ ID NO: 4474 - protein, 38 aa, Homo sapiens [sequence omitted]

SEQ ID NO: 4475 - protein, 59 aa, Homo sapiens
MLWSLASYIVNLAVKVLCLCKGRFVLVQNCPCLSKQVCLILSSISGGYCWHKLKVHPLT

SEQ ID NO: 4476 - protein, 65 aa, Homo sapiens [sequence omitted]

SEQ ID NO: 4477 - protein, 31 aa, Homo sapiens
MCWSSSVLFFFHWPVCLSFVYYHQAITLDSW

SEQ ID NO: 4478 - protein, 35 aa, Homo sapiens
MHICTFYLIILFWEIVICCFVCLLREARRRIYKCE

SEQ ID NO: 4479 - protein, 36 aa, Homo sapiens
MSQTWPHPFICYCLSWFCTTTAELNRCSRSFTEKVF

SEQ ID NO: 4480 - protein, 66 aa, Homo sapiens
MLKCGFMKYVVFLSVLVSFLEMCKSEKHTNHKSGIHHKPKKKKKKKKKKKKKKKKKKKKKKKKKKK

SEQ ID NO: 4481 - protein, 24 aa, Homo sapiens
MDFTVEGSSIHLWLLFNLVLLDFV

SEQ ID NO: 4482 - protein, 37 aa, Homo sapiens
MAQWHSGSSFLFFILGWNLKVVCSSGFGLIFEATLPS

SEQ ID NO: 4483 - protein, 35 aa, Homo sapiens
MLFFNLFCYLGSVLISGQIFTVLSQNITKRRVTTT

SEQ ID NO: 4484 - protein, 30 aa, Homo sapiens
FFFFSAFQHLFHGMSAQHFHELPQGYISTK

SEQ ID NO: 4485 - protein, 111 aa, Homo sapiens
WLLFRSLQRAPSWSFPSNLGTKTADLKGASELPTPCHECREDNDGEGHARPQSGMKPLTEGMRKNGTWLQATAATTRDCGVNPEEADSAFSLLATCSFYDHALHLWEWEGN

SEQ ID NO: 4486 - protein, 32 aa, Homo sapiens
KFQTAVIIFYFCHFSSSNRGPMQQEHKCEIMG

SEQ ID NO: 4487 - protein, 113 aa, Homo sapiens
  SITE (112): Xaa equals any of the naturally occurring L-amino acids
NSILHLPFWIELLKARTVLLTLSSSWCLAPRCSRNICMIELKLKVAVNLFEDYSGNSVYQRIKSLKSESTNSRRSWGMVPSKNRKDQKSQELTAYGGGGNNGLRRVDPQGLXN

SEQ ID NO: 4488 - protein, 172 aa, Homo sapiens
PVCGGFGVLWAWLCTGRWTLLWSSSFPYPGSDVGRLGGPVSSPPFALSCPFPLSPGRCLARLRPPSRQPGCELSLSLFPLVGKWPFPQHLLPGPRGTHLFWSSAWPSVSLGKGKEGWTALIRAGSVCSSGQPECQRCTGMWCVAPGPRHLCFGGFLPCLHTCQGRGDSKVGG

SEQ ID NO: 4489 - protein, 172 aa, Homo sapiens; identical to SEQ ID NO: 4488

SEQ ID NO: 4490 - protein, 34 aa, Homo sapiens
  SITE (17): Xaa equals any of the naturally occurring L-amino acids
MQGAGKALHELLLSAQXQGCLTAGVYESAKVLNV

SEQ ID NO: 4491 - protein, 68 aa, Homo sapiens [sequence omitted]

SEQ ID NO: 4492 - protein, 23 aa, Homo sapiens
KSFCLDLFSCSIFCKMYYIVSLL

SEQ ID NO: 4493 - protein, 65 aa, Homo sapiens
MMFITLPLPLQSYPALLILPQQTDAPGNNVGVSTKKFRRRKYIHVIQNCYLYHKIVKSLCSDFLL

SEQ ID NO: 4494 - protein, 19 aa, Homo sapiens
MDPRPLQAPIAIGSLKLSG

SEQ ID NO: 4495 - protein, 34 aa, Homo sapiens
MFSFISVLFCLFLLVSLRTIHLLFLHWLHLSCDI

SEQ ID NO: 4496 - protein, 35 aa, Homo sapiens
MFSFISVLFCLFLLVSFENNTPSIPSFGYTFPCDI

SEQ ID NO: 4497 - protein, 35 aa, Homo sapiens; identical to SEQ ID NO: 4496

SEQ ID NO: 4498 - protein, 14 aa, Homo sapiens
MAHWHVFYVFSCHS

SEQ ID NO: 4499 - protein, 32 aa, Homo sapiens
MWTSSSRGWGSFLNVCSLLPAWPSMQTLWLTS

SEQ ID NO: 4500 - protein, 47 aa, Homo sapiens
GLSRPTSSSPWPPGAMLLPLGSLCGPSSCLPVASVDQARASGQPFQA

SEQ ID NO: 4501 - protein, 19 aa, Homo sapiens
MGANILLSIATITIGWLWI

SEQ ID NO: 4502 - protein, 31 aa, Homo sapiens
MKFTLMLVMSLELSLRKVLSSVYPLGKYNHE

SEQ ID NO: 4503 - protein, 31 aa, Homo sapiens
MDLSSPTILIIFSGCVSAFLCHIKHCIRNQK

SEQ ID NO: 4504 - protein, 39 aa, Homo sapiens
MIMMRRRKILIFLKILILMKMKGDCLEVKNLSQVKVPEI

SEQ ID NO: 4505 - protein, 10 aa, Homo sapiens
MSCSFLEFSI

SEQ ID NO: 4506 - protein, 17 aa, Homo sapiens
TILFSLLLGFSITKKQI

SEQ ID NO: 4507 - protein, 17 aa, Homo sapiens
TILFSLLLGFSITKKQI

SEQ ID NO: 4508 - protein, 29 aa, Homo sapiens
MAFCFCFFLHPSETAPLCGRQGMGFSPGH

SEQ ID NO: 4509 - protein, 41 aa, Homo sapiens
MALTSVLLFILLFFGVILMCLLRAFYLPDFSWLTFGLYFAP

SEQ ID NO: 4510 - protein, 15 aa, Homo sapiens
MQSLFYSLLLIRVSG

SEQ ID NO: 4511 - protein, 35 aa, Homo sapiens
MAPPGLAVFLLWVLMPPGPTASSQPRAAAPPVSFS

SEQ ID NO: 4512 - protein, 26 aa, Homo sapiens
MLTSGFIFQKIWLLCGEWTMLGQKTK

SEQ ID NO: 4513 - protein, 33 aa, Homo sapiens
MNILIKRILVLAQLMHISDSHICCINWFNTFGT

SEQ ID NO: 4514 - protein, 3 aa, Homo sapiens
LVY

SEQ ID NO: 4515 - protein, 31 aa, Homo sapiens
MVLLILFIHCPLVRCYRILMNAFCIVVFHTS

SEQ ID NO: 4516 - protein, 38 aa, Homo sapiens
MWYLTFSKHFLLLGFPVPFSDGELTVPIEIFIFITILT

SEQ ID NO: 4517 - protein, 33 aa, Homo sapiens
MRQMSLNWKDILTLLCVLTACFWTSTEPALLMQ

SEQ ID NO: 4518 - protein, 80 aa, Homo sapiens
MWGRRQCALWMVFTSTAHTTLGSRPSTKQESARTARPWSSKRLRVRPFSSIPQSENCVASKVAGKPGGNPTTAHIPEVFP

SEQ ID NO: 4519 - protein, 35 aa, Homo sapiens
MVEPGGATMGAGPGSCILLSLLPLARTCLSGDFGL

SEQ ID NO: 4520 - protein, 21 aa, Homo sapiens
MIMGALIRTLDTFVIVFNICI

SEQ ID NO: 4521 - protein, 38 aa, Homo sapiens
MHISYLHSSYVSGAIVWLLSLSVWFHHQSIHPYIKLKI

SEQ ID NO: 4522 - protein, 83 aa, Homo sapiens
MQFHASVPSLMLFLPTGMPSPAPPALSAWQVHLSRSPQRPPPPGRQPLCPSPPGYLCTLSMLLLWHLSHCILLVYMFVSPSRL

SEQ ID NO: 4523 - protein, 98 aa, Homo sapiens
MTRRLRRLSGCRCTPGLGASLPGPGGSWVAWLQGKTGARTHVSPAGVGGAAALGSGVRPWGMFPMVGSLARPEKTCSRASIRCPLEEAELFEGCCKVR

SEQ ID NO: 4524 - protein, 36 aa, Homo sapiens
MLRVDLFTFSFNFTLTEFFFPNQTNSLASVAFSSLR

SEQ ID NO: 4525 - protein, 14 aa, Homo sapiens
NGIAALIWQLCLAF

SEQ ID NO: 4526 - protein, 24 aa, Homo sapiens
MRPIGPSEPFCGCTWGPLWTMGCG

SEQ ID NO: 4527 - protein, 49 aa, Homo sapiens
MPWGNCYVISHLQGSILIQFLLNIQLGCRDIDISFELSEFFIFISKNLI

SEQ ID NO: 4528 - protein, 48 aa, Homo sapiens
MSSISFLLHFLHVLPLWAPLVSLSPLLPVPHLFAVLVEAEVWAAKIWM

SEQ ID NO: 4529 - protein, 41 aa, Homo sapiens
MCRIHLNICKKLQGEELFFVFLFLFVLFFCHFTNWPHDRLR

SEQ ID NO: 4530 - protein, 32 aa, Homo sapiens
MQLCSGVLNPGLISNLFSSHSSQLFCAVHLGS

SEQ ID NO: 4531 - protein, 36 aa, Homo sapiens
MHGLVCFLGFSVSLSCFAFQRSCSYQGITQPLKLSS

SEQ ID NO: 4532 - protein, 56 aa, Homo sapiens
MRIAVLLMTYHSSCMGKQSRKQCPKWKKDTHTEQNSSWSCSWSCQTLPDALSKVKI

SEQ ID NO: 4533 - protein, 23 aa, Homo sapiens
MGLFLLFLLRVGVGCVICKYFCA

SEQ ID NO: 4534 - protein, 136 aa, Homo sapiens
MIQNILFLSAFFWGEGPIIPTLPHTVKSCPLWEPGSFPQNVSRSLEDDPSSTPHACSMGQCPQLPAFPLTMEPGTPGKPGAPRRPRSSRVASLSCRARWPNRPHGTTLARSTRHAGSPLLSCLALLSCSSWITLQR

SEQ ID NO: 4535 - protein, 33 aa, Homo sapiens
MPLSYSFCVLFIVWCIHSWKICNSCVSRICVFT

SEQ ID NO: 4536 - protein, 33 aa, Homo sapiens; identical to SEQ ID NO: 4535

SEQ ID NO: 4537 - protein, 20 aa, Homo sapiens
MLCVCLSTAISATFSLMHVE

SEQ ID NO: 4538 - protein, 8 aa, Homo sapiens
MSAWCNFY

SEQ ID NO: 4539 - protein, 35 aa, Homo sapiens
MCSGNGAACICRAQVLLALCCGICTSPAICCPWAT

SEQ ID NO: 4540 - protein, 13 aa, Homo sapiens
MGSCLLPNVYFSC

SEQ ID NO: 4541 - protein, 32 aa, Homo sapiens
MMFLIIMVITTVLFSDESVRSPGTCEYVVFDL

SEQ ID NO: 4542 - protein, 14 aa, Homo sapiens
FFTFPSAAHTAIQQ

SEQ ID NO: 4543 - protein, 31 aa, Homo sapiens
  SITE (23): Xaa equals any of the naturally occurring L-amino acids
MCMCVHVCACMCVPMCMCACRCXCVCLCVCT

SEQ ID NO: 4544 - protein, 187 aa, Homo sapiens
MVDILRALEKLRKLRKEAAARKGVCPPASADETFTHHLQRLRKLIKKRSELYEAEERALRVMLEGEQEEERKRELEKKQRKEKEKILLQKREIESKLFGDPDEFPLAHLLEPFRQYYLQAEHSLPALIQIRHDWDQYLVHPIIPKATSFPKDGSFPRSPATTSGQLLLSCISKDAPGVWSSQRSFQL

SEQ ID NO: 4545 - protein, 25 aa, Homo sapiens
MESLCCRVHTSRICLMNGVCLLYWS

SEQ ID NO: 4546 - protein, 21 aa, Homo sapiens
MKDLLSQAHETSSEEAVLFLY

SEQ ID NO: 4547 - protein, 27 aa, Homo sapiens
LMLTARFVQCTVVDPSAGFLIWIQARA

SEQ ID NO: 4548 - protein, 6 aa, Homo sapiens
LYLCGS

SEQ ID NO: 4549 - protein, 93 aa, Homo sapiens
QNTLTRFMRLPLISVALVQGWALGGGAEFTTACDFRLMTPESKIRFVHKEMGIIPSWGGTTRLVEIIGSRQALKVLSGALKLGFKKCSKHRNG

SEQ ID NO: 4550 - protein, 12 aa, Homo sapiens
MFLVVVVVLAFN

SEQ ID NO: 4551 - protein, 13 aa, Homo sapiens
IYLFQFTLSFCCF

SEQ ID NO: 4552 - protein, 39 aa, Homo sapiens
PFSLPPFSNCWYVSIVPSPHMQEAARILEIAAWSSETLP

SEQ ID NO: 4553 - protein, 62 aa, Homo sapiens
MTILQVVALPLYLYIILTWHLWPFLCSYVSVFPGRVYALECQELVSLVFFIYLAYKILLRIW

SEQ ID NO: 4554 - protein, 30 aa, Homo sapiens
MEFFETLGLNDSSELSLLFDTKEWHVWGFL

SEQ ID NO: 4555 - protein, 24 aa, Homo sapiens
  SITE (22): Xaa equals any of the naturally occurring L-amino acids
MACKLKLFTIWCFTGKALPTSXFN

SEQ ID NO: 4556 - protein, 45 aa, Homo sapiens
MLWEVCSFAFCNIACCCSLFGFVPPLSAVTLTAKSATSLLRPARP

SEQ ID NO: 4557 - protein, 136 aa, Homo sapiens [sequence omitted]

SEQ ID NO: 4558 - protein, 19 aa, Homo sapiens
MPLLFMSLTLLWQSGCSRK

SEQ ID NO: 4559 - protein, 26 aa, Homo sapiens
AVPHPNLIWNCSSHNSHTSWDGPGER

SEQ ID NO: 4560 - protein, 14 aa, Homo sapiens
MRSLPFYFLLCCFL

SEQ ID NO: 4561 - protein, 4 aa, Homo sapiens
MRKA

SEQ ID NO: 4562 - protein, 8 aa, Homo sapiens
MCAAEPYF

SEQ ID NO: 4563 - protein, 36 aa, Homo sapiens
  SITE (17): Xaa equals any of the naturally occurring L-amino acids
  SITE (34): Xaa equals any of the naturally occurring L-amino acids
MVNFFCFVLLRRVSSLXKKKKKSERHERCKEAQXWL

SEQ ID NO: 4564 - protein, 21 aa, Homo sapiens
MSFHMIVILLQSITKDSTILV

SEQ ID NO: 4565 - protein, 26 aa, Homo sapiens
MQAQFKTPAYSKVSVLILTHCILWVW

SEQ ID NO: 4566 - protein, 26 aa, Homo sapiens
MLNVKHMPNISLVLFVTFFPQYFRVI

SEQ ID NO: 4567 - protein, 30 aa, Homo sapiens
MHSRKPVRVLSILQLVLGLYPSCKDVMPQK

SEQ ID NO: 4568 - protein, 21 aa, Homo sapiens
MQRFVGLCGNIIIIWPCVAMS

SEQ ID NO: 4569 - protein, 9 aa, Homo sapiens
FHLYSLLLV

SEQ ID NO: 4570 - protein, 25 aa, Homo sapiens
MAQESLSPLGLLILVCAEPSVCAEG

SEQ ID NO: 4571 - protein, 34 aa, Homo sapiens
MKCISMAILFWIYGGSRAFLTLKVVCVREKAFTA

SEQ ID NO: 4572 - protein, 21 aa, Homo sapiens
FLCMFFLQTLQRCDYTIVYKQ

SEQ ID NO: 4573 - protein, 21 aa, Homo sapiens
FLCMFFLQTLQRCDYTIVYKQ

SEQ ID NO: 4574 - protein, 78 aa, Homo sapiens
MQFLKNVRCFTFSFSHLVFNIWCVFYTSSTSQFTPATFKMLSSRMQLVQPYLGPVSAWGRAGELSCVHGGPGEPPVLC

SEQ ID NO: 4575 - protein, 11 aa, Homo sapiens
MSSLHTTITVF

SEQ ID NO: 4576 - protein, 34 aa, Homo sapiens
MGLTGPFTFIYLLFEILSGQTTEPQINYFLTKFW

SEQ ID NO: 4577 - protein, 28 aa, Homo sapiens
MRFSKNVIWVHNFILLWSDNSPCEISAF

SEQ ID NO: 4578 - protein, 16 aa, Homo sapiens
DPPCPASIPTILYSTL

SEQ ID NO: 4579 - protein, 73 aa, Homo sapiens
MAPRPHLLTVLLLLPLGLNPKASLQWGGPCLGKAGASSPLVPLLLWRVSCEVSVIPKVKFAGLNDSVCPASLC

SEQ ID NO: 4580 - protein, 91 aa, Homo sapiens [sequence omitted]

SEQ ID NO: 4581 - protein, 32 aa, Homo sapiens
MGLKGAALCLFITWVHCILVVTGFPVYSSPTQ

SEQ ID NO: 4582 - protein, 39 aa, Homo sapiens
MEIGFFLLFFLLRYTANPETTTFLNSSSLAVQTIFCFQM

SEQ ID NO: 4583 - protein, 29 aa, Homo sapiens
MFLNRLKLLYGFWLIIINTVNYTRQPTRS

SEQ ID NO: 4584 - protein, 62 aa, Homo sapiens
  SITE (19): Xaa equals any of the naturally occurring L-amino acids
MLQKEVRQQILIVLMTFKXTYIRESLFSTFFRQNLLLSLHNIYQVFSGMEGEKSKLTLLNIF

SEQ ID NO: 4585 - protein, 76 aa, Homo sapiens
MNSEVECMPFTSVHILPDFLLGCLHTSLTFLLLNLPLCMVLLPPFNRLDVLTSAYCILHPHTSCQVFPYTGSILHS

SEQ ID NO: 4586 - protein, 70 aa, Homo sapiens
MLLYVSVQTPCLLIFCVDVLLTIESGSFQPPAMIRATPYFLQFHQWLLHIFWDSVFDFGTYIFKIIVSPC

SEQ ID NO: 4587 - protein, 34 aa, Homo sapiens
MNGNHAWISWAFSMLFFPSPLPGIYSKLTYNSEN

SEQ ID NO: 4588 - protein, 54 aa, Homo sapiens [sequence omitted]

SEQ ID NO: 4589 - protein, 44 aa, Homo sapiens
MLNGGGELGILHLFLIILDISLLEEKLSVTTEHKVDFSLSSPIF

SEQ ID NO: 4590 - protein, 7 aa, Homo sapiens
MAPKAWP

SEQ ID NO: 4591 - protein, 361 aa, Homo sapiens
  SITE (303): Xaa equals any of the naturally occurring L-amino acids
MWVLTPAAFAGKLLSVFRQPLSSLWRSLVPLFCWLRATFWLLATKRRKQQLVLRGPDETKEEEEDPPLPTTPTSVNYHFTRQCNYKCGFCFHTAKTSFVLPLEEAKRGLLLLKEAGMEKINFSGGEPFLQDRGEYLGKLVRFCKVELRLPSVSIVSNGSLIRERWFQNYGEYLDILAISCDSFDEEVNVLIGRGQGKKNHVENLQKLRRWCRDYRVAFKINSVINRFNVEEDMTEQIKALNPVRWKVFQCLLIEGENCGEDALREAERFVIGDEEFERFLERHKEVSCLVPESNQKMKDSYLXLDEYMRFLNCRKGRKDPSKSILDVGVEEAIKFSGFDEKMFLKRGGKYIWSKADLKLDW

SEQ ID NO: 4592 - protein, 37 aa, Homo sapiens
MNVCFVLFLLYCLLDLGCFPLSVRTVNVDMKVHSPVE

SEQ ID NO: 4593 - protein, 33 aa, Homo sapiens
MVLLVQADCFSLLMNIAWLLIISYLEGSLGEQF

SEQ ID NO: 4594 - protein, 104 aa, Homo sapiens
  SITE (99): Xaa equals any of the naturally occurring L-amino acids
  SITE (103): Xaa equals any of the naturally occurring L-amino acids
MLSPWWGSDCFLELALFFSASELSLLPLALSIFPIYICLSRFKFYLLQDANHNFPIKCNLLVFASPTVLCQKCSPRGTENYSFLQCGCSHPPFFLPFCXQTPXR

SEQ ID NO: 4595 - protein, 399 aa, Homo sapiens
MLSLPCGWLCTAIGLPTMFGYIICGVLLGPSGLNSIKSIVQVETLGEFGVFFTLFLVGLEFSPEKLRKVWKISLQGPCYMTLLMIAFGLLWGHLLRIKPTQSVFISTCLSLSSTPLVSRFLMGSARGDKEGDIDYSTVLLGMLVTQDVQLGLFMAVMPTLIQAGASASSSIVVEVLRILVLIGQILFSLAAVFLLCLVIKKYLIGPYYRKLHMESKGNKEILILGISAFIFLMLTVTELLDVSMELGCFLAGALVSSQGPVVTEEIATSIEPIRDFLAIVFFASIGLHVFPTFVAYELTVLVFLTLSVVVMKFLLAALVLSLILPRSSQYIKWIVSAGLAQVSEFSFVLGSRARRAGVISREVYLLILSVTTLSLLLAPVLWRAAITRCVPRPERRSSL

SEQ ID NO: 4596 - protein, 23 aa, Homo sapiens
MGLAQVVLPAVAHMSLAPVTLLA

SEQ ID NO: 4597 - protein, 39 aa, Homo sapiens
MAFFCSCGSRAVETSWVFLLILCQPPGAVCTGVGHLAPF

SEQ ID NO: 4598 - protein, 61 aa, Homo sapiens
MWLFRSLSGLFTDILASPQLSLTKGYSQKWSPYFPSSNDYLPGGRSSSVHSICFRTYAQRL

SEQ ID NO: 4599 - protein, 48 aa, Homo sapiens
MSILSVSHFEDFFSLLYLCFSFFGFYFVVLSVIFNVPKICTCSIKNVV

SEQ ID NO: 4600 - protein, 71 aa, Homo sapiens
MAGMALARAWKQMSWFYYQYLLVTALYMLEPWERTVFNSMLVSIVGMALYTGYVFMPQHIMAILHYFEIVQ

SEQ ID NO: 4601 - protein, 7 aa, Homo sapiens
ELFILQI

SEQ ID NO: 4602 - protein, 60 aa, Homo sapiens [sequence omitted]

SEQ ID NO: 4603 - protein, 71 aa, Homo sapiens [sequence omitted]

SEQ ID NO: 4604 - protein, 30 aa, Homo sapiens
MTVCGSFAIFLCIKSAIVAASEHACIPTDI

SEQ ID NO: 4605 - protein, 32 aa, Homo sapiens
MHLSNACLVFVLQTCLWWRVVSCSPVRLKAAL

SEQ ID NO: 4606 - protein, 34 aa, Homo sapiens
MTMFFSTWKIATLCSTFSQPQPWSTITMKKKNMP

SEQ ID NO: 4607 - protein, 28 aa, Homo sapiens
MCTAGIAELLTWILVLAFLLLQFQYLHL

SEQ ID NO: 4608 - protein, 42 aa, Homo sapiens
MYLVIFSCCPLGVFPFFSHVNIFHRYPCSLLNLQAHTMLHRS

SEQ ID NO: 4609 - protein, 30 aa, Homo sapiens
MVIVLYINIEHCCDCSRTFYVTALKQRHDY

SEQ ID NO: 4610 - protein, 26 aa, Homo sapiens
GQLRWSSLVSQFACLFILFSAKCIPF

SEQ ID NO: 4611 - protein, 37 aa, Homo sapiens
MVFTFDLFGILLTSGILGRHFFYSSAYEFKAIFCKYF

SEQ ID NO: 4612 - protein, 72 aa, Homo sapiens [sequence omitted]

SEQ ID NO: 4613 - protein, 39 aa, Homo sapiens
CASSPFLSLGPPRHTISVKGLSSPHGLLSQPFPLWQPWG

SEQ ID NO: 4614 - protein, 28 aa, Homo sapiens
FGFGGCFFVVAWFGIFGFVCICINFLYN

SEQ ID NO: 4615 - protein, 48 aa, Homo sapiens
MMGWRILAIGAVLTAAGRLGFPLPSLILVLYPPFHSSPDSLSSSSLYL

SEQ ID NO: 4616 - protein, 21 aa, Homo sapiens
MKLEFFWIFLVICWCVLSSDT

SEQ ID NO: 4617 - protein, 36 aa, Homo sapiens
MCLCCFLLKNCQRSGEGNDRSRKAPHHCVVRQYTER

SEQ ID NO: 4618 - protein, 54 aa, Homo sapiens
MKVVLMLLFICLGNMYLHGLRNLWQILFHIGVAFLSSYQILTRQLQEKQSDCGV

SEQ ID NO: 4619 - protein, 116 aa, Homo sapiens
MVRGPICYSFPPAPLFQFWLLLVSLRYLQPPWLGNHRSAQLSPWSPVSQSLVLPGPPHPHPQEPQPFLRGFQKDSLWRLFLLTFESSPFQFSFTRSNCTQAVLKIGNAFIYTKPFP

SEQ ID NO: 4620 - protein, 32 aa, Homo sapiens
MRLFLCLWSNPAWGKVSISDTIDVFYSALNFI

SEQ ID NO: 4621 - protein, 46 aa, Homo sapiens
MHNLMLILISLFILQISKDKGIFCFVLILARLRGTRHSYTLLGMNR

SEQ ID NO: 4622 - protein, 42 aa, Homo sapiens
MSLGETLLITTYVPVFLLLGVPGCRPPLGKAVTGRCSSTFLD

SEQ ID NO: 4623 - protein, 36 aa, Homo sapiens [sequence omitted]

SEQ ID NO: 4624 - protein, 51 aa, Homo sapiens [sequence omitted]

SEQ ID NO: 4625 - protein, 106 aa, Homo sapiens
MLFTLLVSCYVFLPLALPCFAFFFSFWPIPFYMCPQQRWGDTEHPGSFPALLGRPRLQAPAVETLKGNKQPSTLPDPRLFREAAHFHPGPRTPSLCPTRISLNGRD

SEQ ID NO: 4626 - protein, 36 aa, Homo sapiens
MTFVCKWLLGLEMAWFLFFFFFFLSSSRWEGGLRVL

SEQ ID NO: 4627 - protein, 18 aa, Homo sapiens
GSCLKLTQFKYSFCKTDF

SEQ ID NO: 4628 - protein, 62 aa, Homo sapiens
MGFSLFFLFFLPPFAVFPDLHLLKSKCTFLGLSKCRSFMLSYHTPTECRSHTAKALACHIVM

SEQ ID NO: 4629 - protein, 30 aa, Homo sapiens
MVVAYGRVFMLYLSLLFNFYQIKGSKNINL

SEQ ID NO: 4630 - protein, 18 aa, Homo sapiens
MQQIKFVVFAFQGVTGCP

SEQ ID NO: 4631 - protein, 54 aa, Homo sapiens
MLIQMEKTGEGVGVTVQYFLALGLLLSQFLSLPLLIISGMLAVINPISMMNGLG

SEQ ID NO: 4632 - protein, 10 aa, Homo sapiens
MFVYCIHFHS

SEQ ID NO: 4633 - protein, 7 aa, Homo sapiens
MQSIKRT

SEQ ID NO: 4634 - protein, 34 aa, Homo sapiens [sequence omitted]

SEQ ID NO: 4635 - protein, 45 aa, Homo sapiens
MRGLYFCLGVVICTHAILLKPSCLVLFLESFFFPVLMYAGFGNSS

SEQ ID NO: 4636 - protein, 2 aa, Homo sapiens
MG

SEQ ID NO: 4637 - protein, 44 aa, Homo sapiens
MIFHLSNLLLDTICTFLFSCSQGGGLQGPELCYPTRFLIEIPNH

SEQ ID NO: 4638 - protein, 37 aa, Homo sapiens
MLGIVISCLFYCWTKWEAKEVCQRRWRVRRYHLSKIS

SEQ ID NO: 4639 - protein, 31 aa, Homo sapiens
MILDTKMWVLSILVAVGVLIASRASQDRARK

SEQ ID NO: 4640 - protein, 22 aa, Homo sapiens
MVFIFISTCQLCISKTAGFSKE

SEQ ID NO: 4641 - protein, 30 aa, Homo sapiens
MLEMLLRLLRAIWANVFLWHFYFTNSISSI

SEQ ID NO: 4642 - protein, 756 aa, Homo sapiens
MSALFLLVIGTAYLEAQGIWEPFRRRLSFEASNPPFDVGRPFDLRRIVGISSEGNLNTLSCDPGHSRGFCGAGGSSSRPSAGSHKQCGPSVHPHSSHSNRNSADVENVRAKNSSSTSSRTSAQAASSQSANKTSPLVLDSNTVTQGHTAGRKSKGAKQSQHGSQHHAHSPLEQHPQPPLPPPVPQPQEPQPERLSPAPLAHPSHPERASSARHSSEDSDITSLIEAMDKDFDHHDSPALEVFTEQPPSPLPKSKGKGKPLQRKVKPPKKQEEKEKKGKGKPQEDELKDSLADDDSSSTTTETSNPDTEPLLKEDTEKQKGKQAMPEKHESEMSQVKQKSKKLLNIKKEIPTDVKPSSLELPYTPPLESKQRRNLPSKIPLPTAMTSGSKSRNAQKTKGTSKLVDNRPPALAKFLPNSQELGNTSSSEGEKDSPPPEWDSVPVHKPGSSTDSLYKLSLQTLNADIFLKQRQTSPTPASPSPPAAPCPFVARGSYSSIVNSSSSSDPKIKQPNGSKHKLTKAASLPGKNGNPTFAAVTAGYDKSPGGNGFAKVSSNKTGFSSSLGISHAPVDSDGSDSSGLWSPVSNPSSPDFTPLNSFSAFGNSFNLTGEVFSKLGLSRSCNQASQRSWNEFNSGPSYLWESPATDPSPSWPASSGSPTHTATSVLGNTSGLWSTTPFSSSIWSSNLSSALPFTTPANTLASIGLMGTENSPAPHAPSTSSPADDLGQTYNPWRIWSPTIGRRSSDPWSNSHFPHEN

SEQ ID NO: 4643 - protein, 1 aa, Homo sapiens
F

SEQ ID NO: 4644 - protein, 7 aa, Homo sapiens
KILDFHS

SEQ ID NO: 4645 - protein, 35 aa, Homo sapiens
APSISTGSPSIANLFLTGLLGPEVLHLKHPMLKAA

SEQ ID NO: 4646 - protein, 32 aa, Homo sapiens
MFARCSLLLISFLLFTARFSQVRGHQPWPPFP

SEQ ID NO: 4647 - protein, 17 aa, Homo sapiens
MPLSCYFKLWPSIALSL

SEQ ID NO: 4648 - protein, 34 aa, Homo sapiens
MRKYCLGFCYSVFILGRVLNFMHLHLLACGCAKC

SEQ ID NO: 4649 - protein, 37 aa, Homo sapiens
KTIHSYLFFFSPYCLSQLTLYTDFVSPSIPFTPDYKF

SEQ ID NO: 4650 - protein, 28 aa, Homo sapiens
MKGFFLIVFMLSRAEEEEDEGLVLLSCG

SEQ ID NO: 4651 - protein, 31 aa, Homo sapiens
MIRHLRNTGALLLFSLQLVWADKREIEPSHS

SEQ ID NO: 4652 - protein, 1 aa, Homo sapiens
I

SEQ ID NO: 4653 - protein, 17 aa, Homo sapiens
MRGSSQLCLVLLLPAAL

SEQ ID NO: 4654 - protein, 9 aa, Homo sapiens
MWGRSFLQL

SEQ ID NO: 4655 - protein, 16 aa, Homo sapiens
GHTEGIAVVSHFGFLL

SEQ ID NO: 4656 - protein, 34 aa, Homo sapiens
MDLFGFRALLSFHWNVLFALALFFFFFWFLLAFI

SEQ ID NO: 4657 - protein, 46 aa, Homo sapiens
MTRRHIVLLREFWHWERCRLSRMTAIPTPQSVLRDCGEGASGTGKV

SEQ ID NO: 4658 - protein, 126 aa, Homo sapiens [sequence omitted]

SEQ ID NO: 4659 - protein, 66 aa, Homo sapiens
MALILIVFKYQSFFRLHSCNQQPHAKVLEPAVELQDEDGMVHLSTVISYNLKNRQAGNVYIESYIP

SEQ ID NO: 4660 - protein, 49 aa, Homo sapiens
DQRQWLGVMCELSLLLRMLFCERNCECNGNVGASGDSLSCPLTSKASCA

SEQ ID NO: 4661 - protein, 69 aa, Homo sapiens [sequence omitted]

SEQ ID NO: 4662 - protein, 38 aa, Homo sapiens
MSIFSVLIFFPSHCYSLPSRVRCGEIMLACFHGDTEEK

SEQ ID NO: 4663 - protein, 19 aa, Homo sapiens
MACIPSGLLIWAWNLWFRA

SEQ ID NO: 4664 - protein, 84 aa, Homo sapiens [sequence omitted]

SEQ ID NO: 4665 - protein, 36 aa, Homo sapiens
MCYFLVISIILCIFRLFNSQMYMILPCFLKKNLSIM

SEQ ID NO: 4666 - protein, 20 aa, Homo sapiens
MKAVWYLASSFLIFLVVQKR

SEQ ID NO: 4667 - protein, 27 aa, Homo sapiens
MIRTVIFSTLFLYSVPGMTYSIDFMTH

SEQ ID NO: 4668 - protein, 32 aa, Homo sapiens
TFLFLFWYCKLAGWLHWLTHYPLHHILFFTYY

SEQ ID NO: 4669 - protein, 39 aa, Homo sapiens
MYIIISLTLIMWRFRFFQLMRLQPCLCLKKMKKQNKTMS

SEQ ID NO: 4670 - protein, 36 aa, Homo sapiens
MGLSGPGGSQHSLHFLTSSSFLIFFSFFSIETGAEA

SEQ ID NO: 4671 - protein, 77 aa, Homo sapiens [sequence omitted]

SEQ ID NO: 4672 - protein, 26 aa, Homo sapiens
MSPFFLTVLKHYFAFLFVTKSFIFNG

SEQ ID NO: 4673 - protein, 10 aa, Homo sapiens
MLKSDAVKAI

SEQ ID NO: 4674 - protein, 31 aa, Homo sapiens
  SITE (27): Xaa equals any of the naturally occurring L-amino acids
MYYVQKTNPLVIAMGTVSINFFFFYKXRKVY

SEQ ID NO: 4675 - protein, 39 aa, Homo sapiens
MYICLIILLSTVFCGPDSAFLCFFGFRLLVACDFSDFWP

SEQ ID NO: 4676 - protein, 42 aa, Homo sapiens [sequence omitted]

SEQ ID NO: 4677 - protein, 80 aa, Homo sapiens
ISSTDIWWNRSLDTGLRLLLSWPGAAGTTACVCADTVYYYQMVPSWKFRSPPTWISLLGPFSGSFNVDNDSGMWLYLLLY

SEQ ID NO: 4678 - protein, 37 aa, Homo sapiens
MLIFQIISQQLPYLLLAITTGSQESRYFYSCWTNEKK

SEQ ID NO: 4679 - protein, 30 aa, Homo sapiens
MTPCTLSFPVFLIYIISKYLWLLSSCSPEP

SEQ ID NO: 4680 - protein, 38 aa, Homo sapiens
MTCARSPLALPTPLFFFLLILYSQKRISFSSFFHSLKF

SEQ ID NO: 4681 - protein, 5 aa, Homo sapiens
GKCAC

SEQ ID NO: 4682 - protein, 77 aa, Homo sapiens
MQKQLYFRAWCYLLANFLFFDLTATTFDSTSLKTSARSRQYTLTTLVLTAFPIASLPFKLLLVSVLPSDWSKHNKGL

SEQ ID NO: 4683 - protein, 28 aa, Homo sapiens
MRPYQRKNRTLAFFLRFLIMFLVFCESL

SEQ ID NO: 4684 - protein, 34 aa, Homo sapiens
MATILILSMHLHLLQASSKGLCFCTLPSTFLYDF

SEQ ID NO: 4685 - protein, 66 aa, Homo sapiens
MTLPSWFSCYLSDCPLRGPLSPPVLSFLVSLKGLVMGLRPSKYAPGFNYHLYAAESKSIQLVLNCT

SEQ ID NO: 4686 - protein, 33 aa, Homo sapiens
MVVMEAGGIMPCWFQCWDWLLFVGFGLGSPRKK

SEQ ID NO: 4687 - protein, 34 aa, Homo sapiens
KWLLFIFLLCLQLVNALLSLFQERFVHCPARFVS

SEQ ID NO: 4688 - protein, 29 aa, Homo sapiens
MQLAVFAFSTLWLWLLAMPRLSVGMPYGS

SEQ ID NO: 4689 - protein, 39 aa, Homo sapiens
MRWLLLVFNQIRFTVISLICIYYLFAIILYRIFWIHVLA

SEQ ID NO: 4690 - protein, 30 aa, Homo sapiens
MAFFKVSYHFLIALLTYNWTQPTLSASVNS

SEQ ID NO: 4691 - protein, 38 aa, Homo sapiens
MARADWVLSLLLYNHITALPCIFSSKNGDYLLCGSVCR

SEQ ID NO: 4692 - protein, 6 aa, Homo sapiens
MFIIKI

SEQ ID NO: 4693 - protein, 22 aa, Homo sapiens
HCLHQKQFLFFFLILLLLYLKF

SEQ ID NO: 4694 - protein, 28 aa, Homo sapiens
PRTPCNVGRPALSSMALTSCSGRTSSPG

SEQ ID NO: 4695 - protein, 16 aa, Homo sapiens
MGSSRGREASWGLPLG

SEQ ID NO: 4696 - protein, 74 aa, Homo sapiens
FRFLFSFFHEALWRSMFLLSFLRKPSFWATGLILSTSSFPPFSIVSLPPSHPTPCPSLPQLPLFPCSEFPAQRH

SEQ ID NO: 4697 - protein, 27 aa, Homo sapiens
MCLFLFCLFYFYFSVNARTDLHVKSGL

SEQ ID NO: 4698 - protein, 25 aa, Homo sapiens
GHPKCKLLLSDPCLLMYSLFNCVEF

SEQ ID NO: 4699 - protein, 40 aa, Homo sapiens
MACVILGFCVFWWVSFLGSPDLLLGPVLSANPASFTCPAH

SEQ ID NO: 4700 - protein, 36 aa, Homo sapiens
MWVREGIWFCYLAVVFSHPSFLTIKSHLGLEKKKKK

SEQ ID NO: 4701 - protein, 433 aa, Homo sapiens
  SITE (298): Xaa equals any of the naturally occurring L-amino acids
MATLFTIWCTLCDRAYPSDCPEHGPVTFVPDTPIESRARLSLPKQLVLRQSIVGAEVGVWTGETIPVRTCFGPLIGQQSHSMEVAEWTDKAVNHIWKIYHNGVLEFCIITTDENECNWMMFVRKARNREEQNLVAYPHDGKIFFCTSQDIPPENELLFYYSRDYAQQIGVPEHPDVHLCNCGKECNSYTEFKAHLTSHIHNHLPTQGHSGSHGPSHSKERKWKCSMCPQAFISPSKLHVHFMGHMGMKPHKCDFCSKAFSDPSNLRTHLKIHTGQKNYRCTLCDKSFTQKAHLESHMXIHTGEKNLKCDYCDKLFMRRQDLKQHVLIHTQERQIKCPKCDKLFLRTNHLKKHLNSHEGKRDYVCEKCTKAYLTKYHLTRHLKTCKGPTSSSSAPEEEEEDDSEEEDLADSVGTEDCRINSAVYSADESLSAHK

SEQ ID NO: 4702 - protein, 38 aa, Homo sapiens
MGSPMTWSCRSLSSLWWPPVSSARHRRCSRRGDPGTRG

SEQ ID NO: 4703 - protein, 39 aa, Homo sapiens; identical to SEQ ID NO: 3234

SEQ ID NO: 4704 - protein, 28 aa, Homo sapiens
MIGLTFASTSDFALLSKFNTFQLLMCVL

SEQ ID NO: 4705 - protein, 31 aa, Homo sapiens
MGKGIAVLALWYAATSLGSRPCPCPTTHSQL

SEQ ID NO: 4706 - protein, 17 aa, Homo sapiens
MLLFLIVTLLMNVRSLG

SEQ ID NO: 4707 - protein, 50 aa, Homo sapiens
MFLLFPQTSLTVLFVSCPVEGSRVHILLSVNMPWNLHKGRTMCSFFQQLF

SEQ ID NO: 4708 - protein, 65 aa, Homo sapiens
MHRLALWLLGLWGVMWSHTSALLALVKLWKGRLGKAGTRKKRKRQQQESMQVGKNLVWRAQQRKR

SEQ ID NO: 4709 - protein, 34 aa, Homo sapiens
MERVGRNLTALRFLLFVLILRLLKIIFICSVYYE

SEQ ID NO: 4710 - protein, 43 aa, Homo sapiens
MCESTELNMTFHLFIVALAGAGARNSDRNTTRVNGSQPCSDPQ

SEQ ID NO: 4711 - protein, 55 aa, Homo sapiens
MTQKDGICKDQLLFALLIVCNAVYSNTWSFSSGSGMWINLTNQDPSLNVNTTNYT

SEQ ID NO: 4712 - protein, 24 aa, Homo sapiens
MNCKKQLLTDIFLLLFLGGFFFFF

SEQ ID NO: 4713 - protein, 53 aa, Homo sapiens
MRFLAHVLCSFSVVFLHLKNSHGSMFYKMNYQRNRDGPRFSEMVPCDQVLLFG

SEQ ID NO: 4714 - protein, 35 aa, Homo sapiens
MDLFCSFLPSLLAIMFLCPPVLHFMGYHVQQQLRR

SEQ ID NO: 4715 - protein, 11 aa, Homo sapiens
MSHCVWSLAVS

SEQ ID NO: 4716 - protein, 28 aa, Homo sapiens
MPEWWGQMLWTLGPAALPLLAGRCTREV

SEQ ID NO: 4717 - protein, 38 aa, Homo sapiens
MFGNSSCSTYLLWVSLFNFGHSSECIMISCYGFKFAFS

SEQ ID NO: 4718 - protein, 66 aa, Homo sapiens; identical to SEQ ID NO: 3971

SEQ ID NO: 4719 - protein, 36 aa, Homo sapiens
MFCHCIVCLLLVLWSSLPFFIPSFLLLKVILSCGMI

SEQ ID NO: 4720 - protein, 25 aa, Homo sapiens
MMTLGLSLFLFFCFVGCEFERFCDK

SEQ ID NO: 4721 - protein, 38 aa, Homo sapiens
MDFTKLLTYTFGFAVFIVLGKNCGFKNYSLIKLLKKKK

SEQ ID NO: 4722 - protein, 33 aa, Homo sapiens
MFIGDSAYIFITYLLFWLLSNILSFVFANSVHE

SEQ ID NO: 4723 - protein, 32 aa, Homo sapiens
MLKILMCKSPLSPHLFYKLLWLEGFCFWLLSG

SEQ ID NO: 4724 - protein, 406 aa, Homo sapiens
  SITE (254): Xaa equals any of the naturally occurring L-amino acids
MIRIAALNASSTIEDDHEGSFKSHKTQTKEAQEAEAFALYHKALDLQKHDRFEESAKAYHELLEASLLREAVSSGDEKEGLKHPGLILKYSTYKNLAQLAAQREDLETAMEFYLEAVMLDSTDVNLWYKIGHVALRLIRIPLARHAFEEGLRCNPDHWPCLDNLITVLYTLSDYTTCLYFICKALEKDCRYSKGLVLKEKIFEEQPCLRKDSLRMFLKCDMSIHDVSVSAAETQAIVDEALGLRKKRQALIVRXKEPDLKLVQPIPFFTWKCLGESLLAMYNHLTTCEPPRPSLGKRIDLSDYQDPSQPLESSMVVTPVNVIQPSTVSTNPAVAVAEPVVSYTSVATTSFPLHSPGLLETGAPVGDISGGDKSKKGVKRKKISEESGETAKRRSARVRNTKCKKKK

SEQ ID NO: 4725 - protein, 58 aa, Homo sapiens
MPFCMNACEMLLLLCMAWLPWLAGISSFVVFLSSLCITVSFVFLACKLLEDKGMSESI

SEQ ID NO: 4726 - protein, 14 aa, Homo sapiens
NILFVLIDSILGSS

SEQ ID NO: 4727 - protein, 37 aa, Homo sapiens
MVWICVLLQTLLRHILRSMERNRVDDKVCVVFTKEYS

SEQ ID NO: 4728 - protein, 410 aa, Homo sapiens
  SITE (8): Xaa equals any of the naturally occurring L-amino acids
  SITE (404): Xaa equals any of the naturally occurring L-amino acids
  SITE (409): Xaa equals any of the naturally occurring L-amino acids
GRLRNGIXGAAGIPRANASRTNFSSHTNQSGGSELRQREGQRFGAAHVWENGARSNVTVRNTNQRLEPIRLRSTSNSRSRSPIQRQSGTVYHNSQRESRPVQQTTRRSVRRRGRTRVFLEQDRERERRGTAYTPFSNSRLVSRITVEEGEESSRSSTAVRRHPTITLDLQVRRIRPGENRDRDSIANRTRSRVGLAENTVTIESNSGGFRRTISRLERSGIRTYVSTITVPLRRISENELVEPSSVALRSILRQIMTGFGELSSLMEADSESELQRNGQHLPDMHSELSNLGTDNNRSQHREGSSQDRQAQGDSTEMHGENETTQPHTRNSDSRGGRQLRNPNNLVETGTLPILRLAHFFLLNESDDDDRIRGLTKEQIDNLSTRHYEHNSIDSELGKICSVSXAEFWXP

SEQ ID NO: 4729 - protein, 37 aa, Homo sapiens
MADATCTLLVIFCVMGYEMVHRKKPEKYAKVRFILRV

SEQ ID NO: 4730 - protein, 26 aa, Homo sapiens
MDLVEAFNHSRGPQVMLISLLAGVLV

SEQ ID NO: 4731 - protein, 35 aa, Homo sapiens
MWSRMVRSLWYIMFTWQGGSCVLSGTGSLLSYTRT

SEQ ID NO: 4732 - protein, 224 aa, Homo sapiens
MLRAPGCLLRTSVAPAAALAAALLSSLARCSLLEPRDPVASSLSPYFGTKTRYEDVNPVLLSGPEAPWRDPELLEGTCTPVQLVALIRHGTRYPTVKQIRKLRQLHGLLQARGSRDGGASSTGSRDLGAALADWPLWYADWMDGQLVEKGRQDMRQLALRLASLFPALFSRENYGRCGSSPVPSTAAWIAAPPSCRGCGSTTTLACRRRTSQIWSLDLQQLMIN

SEQ ID NO: 4733 - protein, 11 aa, Homo sapiens
MWPWDMVFSWS

SEQ ID NO: 4734 - protein, 51 aa, Homo sapiens
  SITE (51): Xaa equals any of the naturally occurring L-amino acids
MTVVTALLLIILQTRNLNSGQISVKNWQMFFMRTLIMNLSAAFQKVRCKMX

SEQ ID NO: 4735 - protein, 40 aa, Homo sapiens [sequence omitted]

SEQ ID NO: 4736 - protein, 34 aa, Homo sapiens
MLSQCLLQFVVWVFFFLKPHNNFGKQCMGRTCVC

SEQ ID NO: 4737 - protein, 25 aa, Homo sapiens
MYFCDTVIMFCICLILADLQYAIKV

SEQ ID NO: 4738 - protein, 45 aa, Homo sapiens
MRWTCLLGTPGHPLFFLLCAWSIMSTPADPWKRKCLCCRVLHGHE

SEQ ID NO: 4739 - protein, 36 aa, Homo sapiens
MLYLNMNGKFWFLAFTFYYLNFINANISFVISYSIS

SEQ ID NO: 4740 - protein, 36 aa, Homo sapiens; identical to SEQ ID NO: 4739

SEQ ID NO: 4741 - protein, 36 aa, Homo sapiens; identical to SEQ ID NO: 4739

SEQ ID NO: 4742 - protein, 70 aa, Homo sapiens
MPWCPCWTVLTSKPFLSMLPACSAWPRSTFSSRTSVWKSLRSPRLSWRNTTRLQCFSPSNSCSGMSYFAS

SEQ ID NO: 4743 - protein, 45 aa, Homo sapiens
MGVFDPTEIHNRGQLKSHMKEAMIKLGFHLLCFFMYLYSGSNCPC

SEQ ID NO: 4744 - protein, 29 aa, Homo sapiens
MVLVLLCVGPLGTQAGANGIWAELTEFLE

SEQ ID NO: 4745 - protein, 58 aa, Homo sapiens
MLLLVSVFSPVLFSRSSTVEMDVEPFCLVLSSAFPEITPPISCLCLNMFFSLLRSPHS

SEQ ID NO: 4746 - protein, 33 aa, Homo sapiens
MVCACLLSLRLGLLTECEYKYPYLGEKYIFKGW

SEQ ID NO: 4747 - protein, 33 aa, Homo sapiens
MFCSLLFSQYVQWLLAQNRQYSLTECYWTLSVY

SEQ ID NO: 4748 - protein, 290 aa, Homo sapiens
MAVTAQVKSLTQKVQAGAYPTEKGLSFLEVKDQLLLMYLMDLTHLILDKASGGSLQGHDAVLRLVEIRTVLEKLRPLDQKLKYQIDKLIKTAVTGSLSENDPLRFKPHPSNMMSKLSSEDEEEDEAEDDQSEASGKKSVKGVSKKYVPPRLVPVHYDETEAEREKKRLERAKRRALSSSVIRELKEQYSDAPEEIRDARHPHVTRQSQEDQHRINYEESMMVRLSVSKREKGRRKRANVMSSQLHSLTHFSDISALTGGTVHLDEDQNPIKKRKKIPQKGRKKKGFRRRR

SEQ ID NO: 4749 - protein, 24 aa, Homo sapiens
MGGTPSTKCLVTSAWSGFSACTPC

SEQ ID NO: 4750 - protein, 25 aa, Homo sapiens
MTRSLVLRFKVLLMLGLLIEVSEEL

SEQ ID NO: 4751 - protein, 73 aa, Homo sapiens
MPSLWDRFSSSSTFQLTLVLRLDSRLWPKIQGLFSSANSPFLPGFSQSLTLSTGFRVIKKKLYSSEQLLIEEC

SEQ ID NO: 4752 - protein, 55 aa, Homo sapiens
MPHPPLPETSLEAQLPMGLLQLLRCSVQAWSPPPSSFCPGSEPRSASAHWGYWWP

SEQ ID NO: 4753 - protein, 27 aa, Homo sapiens
MPISVSSFCAAVIVGLPVSFELWALPG

SEQ ID NO: 4754 - protein, 33 aa, Homo sapiens
MIVVVLWINLCSWFCFVSPLPKCSFQYYTRKRS

SEQ ID NO: 4755 - protein, 67 aa, Homo sapiens
  SITE (45): Xaa equals any of the naturally occurring L-amino acids
MVLMGIFFSTLFVFMDSGTWASSIFFHLMTCVLSLGVVLPWLHRXIRRIPCSGFFSFSSRQTPASTS

SEQ ID NO: 4756 - protein, 7 aa, Homo sapiens
VGILCLW

SEQ ID NO: 4757 - protein, 144 aa, Homo sapiens
MDVRKLDFPSASFDVVLEKGTLDALLAGERDPWTVSPEGVHTVDQVLSEVSRVLVPGGRFISMTSAAPHFRTRHYAQAYYGWSLRHATYGSGFHFHLYLMHKGGKLSVAQLALGAQILSPPRTPTSPCFLQDSDHEDFLSAIQL

SEQ ID NO: 4758 - protein, 18 aa, Homo sapiens
VLCSLSCMLKLGVCWRAS

SEQ ID NO: 4759 - protein, 96 aa, Homo sapiens [sequence omitted]

SEQ ID NO: 4760 - protein, 15 aa, Homo sapiens
MLHFCFIFYFSLLCF

SEQ ID NO: 4761 - protein, 24 aa, Homo sapiens
EKRRKKARSTGNLGCGTMSRRMRT

SEQ ID NO: 4762 - protein, 148 aa, Homo sapiens
  SITE (128): Xaa equals any of the naturally occurring L-amino acids
MAKFRRRTCIILALFILFIFSLMMGLKMLRPNTATFGAPFGLDLLPELHQRTIHLGKNFDFQKSDRINSETNTKNLKSVEITMKPSKASELNLDELPPLNNYLHVFYYSWYGNPQFDGKYIHWNHPVXEHWDPRIAKNYPQGRHNPSR

SEQ ID NO: 4763 - protein, 14 aa, Homo sapiens
MPEAHGPSEGLWGT

SEQ ID NO: 4764 - protein, 36 aa, Homo sapiens [sequence omitted]

SEQ ID NO: 4765 - protein, 25 aa, Homo sapiens
MGLHLTFLVILVDQMPLGHQSLLQD

SEQ ID NO: 4766 - protein, 377 aa, Homo sapiens [sequence omitted]

SEQ ID NO: 4767 - protein, 175 aa, Homo sapiens
MDLAGRKVLLFVSAAIMFAANLTLGLYIHFGPRPLSPNSTAGLESESWGDLAQPLAAPAGYLTLVPLLATMLFIMGYAVGWGPITWLLMSEVLPLRARGVASGLCVLASWLTAFVLTKSFLPVVSTFGLQVPFFFFAAICLVSLVFTGCCVPETKGRSLEQIESFFRTGRRSFLR

SEQ ID NO: 4768 - protein, 31 aa, Homo sapiens
MWFMSNSAVLLWLWFKFLMFKVDAVFRRAFY

SEQ ID NO: 4769 - protein, 59 aa, Homo sapiens
  SITE (37): Xaa equals any of the naturally occurring L-amino acids
MWAKVPPPHKALGSPRSPHRQTWGSRPRVGPREEGLXVGRGITEWKEIEGAESAFAVMS

SEQ ID NO: 4770 - protein, 48 aa, Homo sapiens [sequence omitted]

SEQ ID NO: 4771 - protein, 11 aa, Homo sapiens
MRLLVLFCFIN

SEQ ID NO: 4772 - protein, 417 aa, Homo sapiens
NSRVDPRVRGEIPISSSQTNRSSFDLLPREFRLVEVHDPPLHQPSANKPKPPTMLDIPSEPCSLTIHTIQLIQHNRRLRNLIATAQAQNQQQTEGVKTEESEPLPSCPGSPPLPDDLLPLDCKNPNAPFQIRHSDPESDFYRGKGEPVTELSWHSCRQLLYQAVATILAHAGFDCANESVLETLTDVAHEYCLKFTKLLRFAVDREARLGQTPFPLNGKEQGFHEVGIGSVLSLQKFWQHRIKDYHSYMLQISKQLSEEYERIVNPEKATEDAKPVKIKEEPVSDITFPVSEELEADLASGDQSLPMGVLGAQSERFPSNLEVEASPQASSAEVNASPLWNLAHVKMEPQESEEGNVSGHGVLGSDVFEEPISGMSEAGIPQSPDDSDSSYGSHSTDSLMGSSPVFNQRCKKRMRKI

SEQ ID NO: 4773 - protein, 38 aa, Homo sapiens
MLSGYPLSFFLLTICLVVLTARGTEGLCPGIWRPALFT

SEQ ID NO: 4774 - protein, 19 aa, Homo sapiens
MLLFLLLLLLSSLLALNDC

SEQ ID NO: 4775 - protein, 30 aa, Homo sapiens
MGAPTRKCSVQWLSLSVPFLSAQCSAWRSI

SEQ ID NO: 4776 - protein, 31 aa, Homo sapiens
MQSHFLKDFHPDPALDKHFLLFRSKTYKSCK

SEQ ID NO: 4777 - protein, 37 aa, Homo sapiens
MPFKYLFMGFISHILSAPSSETLHLFHLPSKESEADD

SEQ ID NO: 4778 - protein, 44 aa, Homo sapiens
MSGCGASGMNLFHVLCWELALGDHNPQSPQHQGKVPGAQEGKPT

SEQ ID NO: 4779 - protein, 33 aa, Homo sapiens
MATPSFLFFFLLLNFNSSFVWLFSFLCLFPVKL

SEQ ID NO: 4780 - protein, 44 aa, Homo sapiens
  SITE (8): Xaa equals any of the naturally occurring L-amino acids
  SITE (40): Xaa equals any of the naturally occurring L-amino acids
MCPLPMLXSLLTFSFFSLSYLLLLWSSSNSSSVHLNSTFXDPVG

SEQ ID NO: 4781 - protein, 25 aa, Homo sapiens
HLLIYRIFICTCFHLFVVNFLRQTH

SEQ ID NO: 4782 - protein, 38 aa, Homo sapiens
METSYITLLCVFTHVGFAVLALTAHGSAGHTPTHTNCH

SEQ ID NO: 4783 - protein, 39 aa, Homo sapiens
MWIMGLLYILVFYNFKISINSQKWERKRQQDFGSWRQIY

SEQ ID NO: 4784 - protein, 32 aa, Homo sapiens
MGAGCVAVLLLGQAAGETVFPWPCPVGPSMMS

SEQ ID NO: 4785 - protein, 25 aa, Homo sapiens
MLFFLCFCFLQLFHVYKANPFCSAH

SEQ ID NO: 4786 - protein, 45 aa, Homo sapiens
MDSILIFKWQKLGWGAFKTCFLNCVLTYTIWCFICLFFLTMSRRP

SEQ ID NO: 4787 - protein, 42 aa, Homo sapiens
MQKFVVIMYLCLVTIMFYRPTLVPGHYCKMLKSQENFTELKK

SEQ ID NO: 4788 - protein, 29 aa, Homo sapiens
MVIHYFLLFLVKSWCVMESTCSMCVCLCV

SEQ ID NO: 4789 - protein, 40 aa, Homo sapiens
MLAVFLRIKLRLAGTVKPKFLFVSFLAPLIFLDFEKFTVW

SEQ ID NO: 4790 - protein, 102 aa, Homo sapiens
MGLRNILKVCCTHDITTISIPLLLVHDMSEEMTIPWCLRRAELVFKCVKGFMMEMASWDGGISRTVQFLVPQSISEEMFYQLSNMLPQIFRVSSTLTLTSKH

SEQ ID NO: 4791 - protein, 102 aa, Homo sapiens; identical to SEQ ID NO: 4790

SEQ ID NO: 4792 - protein, 14 aa, Homo sapiens
MVPSEACPLVCTLV

SEQ ID NO: 4793 - protein, 57 aa, Homo sapiens
MWRRDQSLLLVSLQLPFSPVSGTPRFMPAVQPCQPHRLNTPSNSCSVFLGGGAPRGN

SEQ ID NO: 4794 - protein, 122 aa, Homo sapiens
VAEYREWGRARAGGRDQGLDPLSSFSLGRTGQLPPTLTPLLPVNGAVREESIHCKSVEEISTLVQKLADQSGLDVIRIRKPFHTDNPSIQGQWHPFTNKPTTFRGLRPREVQDPAPAQVQAQ

SEQ ID NO: 4795 - protein, 65 aa, Homo sapiens
MLSLLSLCLLNPQAPVLPDSGTCTLPLQSGVLRALRTMKHAWCIFLSVNFPHWLLFNPLHFYSKS

SEQ ID NO: 4796 - protein, 40 aa, Homo sapiens
MGTDALSFLLWGFPFLWSPCSPCPPSGAAGLKGGTRGGRV

SEQ ID NO: 4797 - protein, 55 aa, Homo sapiens
MPVTWFLAWSAFFQVCLGPSPARGYSTLQARYAFFQPLGCGHCIQVGTSFPSLPF

SEQ ID NO: 4798 - protein, 30 aa, Homo sapiens
MAMWVVAVIASSATLGLAKITHDLQSTLQL

SEQ ID NO: 4799 - protein, 38 aa, Homo sapiens
MLFFPHSPLNIVLYALLNTFSFVSQASLWMTPKYNFFH

SEQ ID NO: 4800 - protein, 46 aa, Homo sapiens
ADGPCFGPALFLTLALTWEGLEGPSHHPRSPSAVPFPCRLAAASPA

SEQ ID NO: 4801 - protein, 31 aa, Homo sapiens
MCVCVCVCVCVCVHRVLPCVVFFWRLSLWSR

SEQ ID NO: 4802 - protein, 32 aa, Homo sapiens
MRLSTWLTFNMCIFTLCIFLTGLSRLDCIHHI

SEQ ID NO: 4803 - protein, 17 aa, Homo sapiens
ASQTFSTELWCFGLWHT

SEQ ID NO: 4804 - protein, 33 aa, Homo sapiens
MKDRKQWAFKTRWPFFHFLMLSLALDCYRFLTS

SEQ ID NO: 4805 - protein, 30 aa, Homo sapiens
MAILLTFLVYVIITSIGKQLHKKNLYIFNF

SEQ ID NO: 4806 - protein, 15 aa, Homo sapiens
MRFLWCQPVASVWGS

SEQ ID NO: 4807 - protein, 294 aa, Homo sapiens
MMVQMISDANTAGNGFMAMFSAAEPNERGDQYCGGLLDRPSGSFKTPNWPDRDYPAGVTCVWHIVAPKNQLIELKFEKFDVERDNYCRYDYVAVFNGGEVNDARRIGKYCGDSPPAPIVSERNELLIQFLSDLSLTADGFIGHYIFRPKKLPTTTEQPVTTTFPVTTGLKPTVALCQQKCRRTGTLEGNYCSSDFVLAGTVITTITRDGSLHATVSIINIYKEGNLAIQQAGKNMSARLTVVCKQCPLLRRGLNYIIMGQVGEDGRGKIMPNSFIMMFKTKNQKLLDALKNKQC

SEQ ID NO: 4808 - protein, 40 aa, Homo sapiens
MFVPYLWVFRSLSLSLFLFLSVFSISHLHLGSILCSLSQD

SEQ ID NO: 4809 - protein, 32 aa, Homo sapiens
MSIKRQSVLATLSLQIVAFPLQQGPRGDTGNL

SEQ ID NO: 4810 - protein, 31 aa, Homo sapiens
MQMLRKLFTAIRALFLAVCVLKVIVSLVPWE

SEQ ID NO: 4811 - protein, 37 aa, Homo sapiens
MLTHISFASFIRLVLTLGGDIYSQMRSRHKVKNGTIY

SEQ ID NO: 4812 - protein, 33 aa, Homo sapiens
MTSAFLFLFLDSVLFTWACVWLGDRQECQKAGR

SEQ ID NO: 4813 - protein, 26 aa, Homo sapiens
VNYLFKILTVHYVPTMKPLSPKTQTD

SEQ ID NO: 4814 - protein, 21 aa, Homo sapiens
MIRTPNQIQKPVLLYLLHWPS

SEQ ID NO: 4815 - protein, 55 aa, Homo sapiens
MDLLFLDMGLSAWQMWKLKFLVPLQVLASQPCRKVVYRPFILKLITCPWWTFLWW

SEQ ID NO: 4816 - protein, 12 aa, Homo sapiens
DSTLLIFLIITL

SEQ ID NO: 4817 - protein, 25 aa, Homo sapiens
  SITE (7): Xaa equals any of the naturally occurring L-amino acids
LNTSDFXFVYCFSLSFSSLSKQLLD

SEQ ID NO: 4818 - protein, 37 aa, Homo sapiens
MNKQKRKQGTCVSLSLLFCLSLCPLSYVSHAVSCPCF

SEQ ID NO: 4819 - protein, 23 aa, Homo sapiens
MLLCILIVCIYSAYVACLQNYIK

SEQ ID NO: 4820 - protein, 18 aa, Homo sapiens
MPFRWAASLATWFQGAVL

SEQ ID NO: 4821 - protein, 383 aa, Homo sapiens
LLLYAPVGFCLLVLRLFLGIHVFLVSCALPDSVLRRFVVRTMCAVLGLVARQEDSGLRDHSVRVLISNHVTPFDHNIVNLLTTCSTPLLNSPPSFVCWSRGFMEMNGRGELVESLKRFCASTRLPPTPLLLFPEEEATNGREGLLRFSSWPFSIQDVVQPLTLQVQRPLVSVTVSDASWVSELLWSLFVPFTVYQVRWLRPVHRQLGEANEEFALRVQQLVAKELGQTGTRLTPADKAEHMKRQRHPRLRPQSAQSSFPPSPGPSPDVQLATLAQRVKEVLPHVPLGVIQRDLAKTGCVDLTITNLLEGAVAFMPEDITKGTQSLPTASASKFPSSGPVTPQPTALTFAKSSWARQESLQERKQALYEYARRRFTERRAQEAD

SEQ ID NO: 4822 - protein, 44 aa, Homo sapiens
KALYTWLPSVLPLALSMRSQALGRLCNHPPNLVHFPQVAFLNSP

SEQ ID NO: 4823 - protein, 37 aa, Homo sapiens
KTITHVLQLLVLLPAHSWYLSIIVVASEKNSKKKEYT

SEQ ID NO: 4824 - protein, 29 aa, Homo sapiens
MSTFYIFIFMNNTVRKGSNASCNYWYIKV

SEQ ID NO: 4825 - protein, 123 aa, Homo sapiens
YWALLRTLLALAAFSTAIAALKLWNEDFRYGYSYYNSACRISSSSDWNTPAPTQSPEEVRRLHLCTSFMDMLKALFRTLQAMLLGVWILLLLASLAPLWLYCWRMFPTKGKRDQKEMLEVSGI

SEQ ID NO: 4826 - protein, 40 aa, Homo sapiens
MCSHPLASRALFPGILVKVVSCIPLPFYLGFDIGKVYLKT

SEQ ID NO: 4827 - protein, 74 aa, Homo sapiens [sequence omitted]

SEQ ID NO: 4828 - protein, 43 aa, Homo sapiens
  SITE (41): Xaa equals any of the naturally occurring L-amino acids
MSHHAWLSVLFSVSVPSVSSAYMFSILSCSFSSVPTRYFWXKN

SEQ ID NO: 4829 - protein, 67 aa, Homo sapiens
MTKVPSCFLLPVLLLGRKRGLMRLHSGAHITRCICRHRAGCLQPGEGQREGVYECECVCMEVGALGV

SEQ ID NO: 4830 - protein, 67 aa, Homo sapiens; identical to SEQ ID NO: 4829

SEQ ID NO: 4831 - protein, 129 aa, Homo sapiens [sequence omitted]

SEQ ID NO: 4832 - protein, 36 aa, Homo sapiens
MHNTFFNTILITKHLIYCYFVCFLNCIFCQCGISCL

SEQ ID NO: 4833 - protein, 31 aa, Homo sapiens
MKSQSSLSVGILRVTLCLVPSCVPAIDCNAQ

SEQ ID NO: 4834 - protein, 46 aa, Homo sapiens
MLVLSEQWELVWDLLLQLPWWLKIEALGNGSSVWKETVHLGFLAWR

SEQ ID NO: 4835 - protein, 55 aa, Homo sapiens
MRQQRWPRSILLLCGELCFSLVTIGKGSCSYVSLPVPQSFVHGVGHHLLPIQGND

SEQ ID NO: 4836 - protein, 51 aa, Homo sapiens
MPRAWWPSYTCSLLCLSISVHQFDSQTMFPSKWLWSRNEKESSSLGKSKRK

SEQ ID NO: 4837 - protein, 51 aa, Homo sapiens
MNPFIFNVITDTVQFKSSILLLTFASIFLSSFPAFSYFNQIVLTISLHHVF

SEQ ID NO: 4838 - protein, 44 aa, Homo sapiens
MRQNFVAQFVQLLKCWLCDVWSGVVVEKNWAPSVDQCQLQVLQF

SEQ ID NO: 4839 - protein, 45 aa, Homo sapiens [sequence omitted]

SEQ ID NO: 4840 - protein, 40 aa, Homo sapiens
MCLHLLLAISGILNLHCHLVLCSCGRYTQKTQANTTWVTS

SEQ ID NO: 4841 - protein, 40 aa, Homo sapiens; identical to SEQ ID NO: 4840

SEQ ID NO: 4842 - protein, 343 aa, Homo sapiens
  SITE (184): Xaa equals any of the naturally occurring L-amino acids
  SITE (198): Xaa equals any of the naturally occurring L-amino acids
  SITE (210): Xaa equals any of the naturally occurring L-amino acids
  SITE (300): Xaa equals any of the naturally occurring L-amino acids
  SITE (307): Xaa equals any of the naturally occurring L-amino acids
MYISPEEFKPIAEKLTGSTPAASYEEEELPPDPSEETLTIEARFQPLLPETMTKSKDGFLGVSRLALSGLRNWTAAASPSAVFATRHFQPFLPPPGQELGEPWWIIPSELSMFTGYLSNNRFYPPPPKGKEVIIHRLLSMFHPRPFVKTRFAPQGAVACLTAISDFYYTVMFRIHAEFQLSEPXDFPFWFSPAQFTGXIILSKDATHVRXFRLFVPNHRSLNVDMEWLYGASESSNMEVDIGYIPQMELEATGPSVPSVILDEDGSMIDSHLPSGEPLQFVFEEIKWAAGAELGGGCPAXGGGHVPXQEVSYLPFTEAFDRAKAENKLVHSILLWGALDDQSC

SEQ ID NO: 4843 - protein, 55 aa, Homo sapiens
MTFGEYVALIFFTLIIFLSSRQPIAPWRPHQPCKFSPAAWRLGRGAAVTRRYTRL

SEQ ID NO: 4844 - protein, 52 aa, Homo sapiens
MTLHVSRLWCCCPKKGQAWSAYGALLWCYLAPVSLESEEVWPLKIKLPPELL

SEQ ID NO: 4845 - protein, 51 aa, Homo sapiens
MYFPCRWLLPSVLGYLAMELLRQSLPRWRSSQCLHLPIRNTRCLPWCKVPR

SEQ ID NO: 4846 - protein, 16 aa, Homo sapiens
MLLGNLIATMQATGNL

SEQ ID NO: 4847 - protein, 48 aa, Homo sapiens
MFWEVLFIVCFPTFALITRLSSLIIETMSLYLVPSIVPSTQCMHSLLV

SEQ ID NO: 4848 - protein, 10 aa, Homo sapiens
MRLFVLLLMT

SEQ ID NO: 4849 - protein, 1 aa, Homo sapiens
I

SEQ ID NO: 4850 - protein, 32 aa, Homo sapiens
MGGIQYCMWGHPGWGGDAWHPSLHSPARPGGV

SEQ ID NO: 4851 - protein, 21 aa, Homo sapiens
MVIIEMLLKILWVVFWAGYPC

SEQ ID NO: 4852 - protein, 7 aa, Homo sapiens
DVHMRSR

SEQ ID NO: 4853 - protein, 38 aa, Homo sapiens
  SITE (14): Xaa equals any of the naturally occurring L-amino acids
MRSPLSASALLLWXSSVARAFSSPSLLMAVPSPTCSRY

SEQ ID NO: 4854 - protein, 38 aa, Homo sapiens
  SITE (14): Xaa equals any of the naturally occurring L-amino acids
  SITE (34): Xaa equals any of the naturally occurring L-amino acids
MRSPLSASALLLWXSSVARAFSSPSLLMAVPSPXCSRY

SEQ ID NO: 4855 - protein, 38 aa, Homo sapiens; identical to SEQ ID NO: 4854
  SITE (14): Xaa equals any of the naturally occurring L-amino acids
  SITE (34): Xaa equals any of the naturally occurring L-amino acids

SEQ ID NO: 4856 - protein, 38 aa, Homo sapiens; identical to SEQ ID NO: 4854
  SITE (14): Xaa equals any of the naturally occurring L-amino acids
  SITE (34): Xaa equals any of the naturally occurring L-amino acids

SEQ ID NO: 4857 - protein, 41 aa, Homo sapiens
ISSLVGNLATIQKFKIYCQPSRFWNTSPSIRTGWRPVDTPK

SEQ ID NO: 4858 - protein, 15 aa, Homo sapiens
MTAWYIWVTCVGSLL

SEQ ID NO: 4859 - protein, 60 aa, Homo sapiens [sequence omitted]

SEQ ID NO: 4860 - protein, 61 aa, Homo sapiens [sequence omitted]

SEQ ID NO: 4861 - protein, 17 aa, Homo sapiens
MGFVVLLLCQVPLGQLG

SEQ ID NO: 4862 - protein, 146 aa, Homo sapiens
MVVWYLFQIVSAVSCIHKAGILHRDIKTLNIFLTKANLIKLGDYGLAKKLNSEYSMAETLVGTPYYMSPELCQGVKYNFKSDIWAVGCVIFELLTLKRTFDATNPLNLCVKIVQGIRAMEVDSSQYSLELIQMVHSCLDQVQEPLP

SEQ ID NO: 4863 - protein, 54 aa, Homo sapiens
MLAFICSISSLLGCFWGITCLSSKLETSNSPGDAVALFVGQWHLLVVCNVYSLV

SEQ ID NO: 4864 - protein, 26 aa, Homo sapiens
MYQYYIPLHCLIIIIIIVHCMGIPRL

SEQ ID NO: 4865 - protein, 31 aa, Homo sapiens
MARAATGAGKATWTLFCWLMAPRACVHKTSS

SEQ ID NO: 4866 - protein, 23 aa, Homo sapiens
MGLFLLFLLRVGVGCVICKYFCA

SEQ ID NO: 4867 - protein, 62 aa, Homo sapiens
LECWKDMIRAACSSQKSVSTIKWMPNHQTHKCSRCVPGYGISRYKKYFNYSFVINITYEKKI

SEQ ID NO: 4868 - protein, 26 aa, Homo sapiens
MYILFLSSVLIMGAFLKLISYFPIYI

SEQ ID NO: 4869 - protein, 37 aa, Homo sapiens
MLLAYHIFISVSICRLLGPGNDSGEFPSLVSGIYSHL

SEQ ID NO: 4870 - protein, 43 aa, Homo sapiens
MSTLFTWLMVLRYLLPNSCFVLNRPSFCNPFGTSPISCRKASS

SEQ ID NO: 4871 - protein, 70 aa, Homo sapiens
MPNGHWHWACLCHWGSTQAVSICATLAFPSRSSRRWASTTTRPLAASLLSHCTLLRGFLRRQDSAVPCCS

SEQ ID NO: 4872 - protein, 33 aa, Homo sapiens
MTSITSHVLVTVLLIISLSTQTLETVSLTRSRE

SEQ ID NO: 4873 - protein, 23 aa, Homo sapiens
MACILFLNAFLLIPILLGIWTFY

SEQ ID NO: 4874 - protein, 58 aa, Homo sapiens
MKSFQIPLFFFPNGFHMCLKYLYFELSDFPCPPFSFVPSLSQHQSRIQNLPVKGQPSF

SEQ ID NO: 4875 - protein, 28 aa, Homo sapiens
MLVGAALPLVPGVASAQSQRAGSRVLHR

SEQ ID NO: 4876 - protein, 32 aa, Homo sapiens
MSNAELALLLFIILTVGHYAVVWSIYLGKTTG

SEQ ID NO: 4877 - protein, 46 aa, Homo sapiens
MVSGLIKHSNWLCFTLALVHAKCSISFSLLHCSFAMLLCSGLDVIF

SEQ ID NO: 4878 - protein, 24 aa, Homo sapiens
MWFLSLLLSFICFLISAEYEICLF

SEQ ID NO: 4879 - protein, 32 aa, Homo sapiens
MAAPGWPGPRSASVVALTFDKSFPCLCLGCPI

SEQ ID NO: 4880 - protein, 55 aa, Homo sapiens
GLPFCLVLACILPCYHLLLFLPRWFVKNKSPGCMCPLIHSVWAKENEALMVTWCF

SEQ ID NO: 4881 - protein, 9 aa, Homo sapiens
MYCLSAILI

SEQ ID NO: 4882 - protein, 50 aa, Homo sapiens
MALSHLLLHSRPLLEVCLSHVLLSPHERPLLLFPCLLSGLSGAVLRVLLG

SEQ ID NO: 4883 - protein, 34 aa, Homo sapiens
FCTVCLLTFIEHILPSSIRITHLMVRKSCWEYDS

SEQ ID NO: 4884 - protein, 57 aa, Homo sapiens
MAAIWHFAFCTYLDVLDISPRPLIDNCPGVFLAAEMMWTEFIWPIPRQWPLRLFPKF

SEQ ID NO: 4885 - protein, 72 aa, Homo sapiens
MRAGTFDWFAVACQELYLLRAQMTESVQPSVIHLFSLFLFPYRVCEPLLTKYQSGPSPAHVKEEGAVGLRPH

SEQ ID NO: 4886 - protein, 15 aa, Homo sapiens
MTTVSPIPISCLFAA

SEQ ID NO: 4887 - protein, 23 aa, Homo sapiens
MLVGVVDVSCLLWPSLPLLPENT

SEQ ID NO: 4888 - protein, 59 aa, Homo sapiens
TLAQEHRSRGLAWSTRPPLCKAPEGPRGCGLIRRLHLWTGLHTRSYRTAICLPCRGRWP

SEQ ID NO: 4889 - protein, 86 aa, Homo sapiens
MQSREPPPVCFMAMVLSACVFSFFLNRLFSGSLISLSASRSLFCLGCFSPAVPSTRFPGSCPPRALPQGSTTPRCSPTALSGRPPV

SEQ ID NO: 4890 - protein, 19 aa, Homo sapiens
MLHCFKKKKMLMIVLGLQA

SEQ ID NO: 4891 - protein, 33 aa, Homo sapiens
MMLALFIVLLLIPPRQNENQMPFPEGLSEGFGP

SEQ ID NO: 4892 - protein, 48 aa, Homo sapiens
MGLQVTPPLSFTGLWFVVMANMGWQRTILTKVEALQHGVQPLSMDSGP

SEQ ID NO: 4893 - protein, 20 aa, Homo sapiens
MGCPGLEGTLFLPPPLPNLS

SEQ ID NO: 4894 - protein, 98 aa, Homo sapiens
MNTKGRDFHLAVFVFPQPSMVRGSRNGCLITAVTPSRKDSQRNCSLKKKKIHKVGCTLKVLRRASVLENLPEILKAYKKGESSKLNFDSHGWGLYLFL

SEQ ID NO: 4895 - protein, 21 aa, Homo sapiens
METSGLVWLLLLEKLGAKAAS

SEQ ID NO: 4896 - protein, 10 aa, Homo sapiens
MGGVSGFSVA

SEQ ID NO: 4897 - protein, 38 aa, Homo sapiens
  SITE (35): Xaa equals any of the naturally occurring L-amino acids
  SITE (38): Xaa equals any of the naturally occurring L-amino acids
MALQWFCILVGNLFWFILAFPQPSCWFFGKMWHPXQTX

SEQ ID NO: 4898 - protein, 59 aa, Homo sapiens
  SITE (26): Xaa equals any of the naturally occurring L-amino acids
MALYAGFLLWAGHLQEGYSWRNGWGXVAVDSSLGPERIESELGKLQSELKSRNPVGGKY

SEQ ID NO: 4899 - protein, 141 aa, Homo sapiens
HSLLLLLLLTLLGLGLVQPSYGQDGMYQRFLRQHVHPEETGGSDRYCNLMMQRRKMTLYHCKRFNTFIHEDIWNIRSICSTTNIQCKNGKMNCHEGVVKVTDCRDTGSSRAPNCRYRAIASTRRVVIACEGNPQVPVHFDG

SEQ ID NO: 4900 - protein, 68 aa, Homo sapiens
MWRGVARGRKRKCLVLFCSPALLSQQLFVIVVVVLRQVPPGACGILLPVSVSKCHRPPIATYSWHCTF

SEQ ID NO: 4901 - protein, 16 aa, Homo sapiens
MFQSVSLTYLHFKYGL

SEQ ID NO: 4902 - protein, 29 aa, Homo sapiens
MAVRFEALQSCGTPWCVCSVLGTCMGTHR

SEQ ID NO: 4903 - protein, 32 aa, Homo sapiens
MLHLSSFLVYFANWLLNSETWSDSGSVSLAIL

SEQ ID NO: 4904 - protein, 15 aa, Homo sapiens
MFSIIAFPLILLTCC

SEQ ID NO: 4905 - protein, 72 aa, Homo sapiens
MISSGSSRYAETWDLLLFLRLTCCAHCAWTPWHDAGRGCRTHTSFEVRQSTNPSSTTHSFSSSQLCGLGQIA

SEQ ID NO: 4906 - protein, 37 aa, Homo sapiens
LLLVLLIFVASAHGALVSPQSNGGSPKQLHYRVILGK

SEQ ID NO: 4907 - protein, 25 aa, Homo sapiens
MFEIRTALSLRLIPLFVSTCGVTQK

SEQ ID NO: 4908 - protein, 30 aa, Homo sapiens
MLVAFLVLYFSFPYLAFVGPKPTNNRLLKE

SEQ ID NO: 4909 - protein, 66 aa, Homo sapiens [sequence omitted]

SEQ ID NO: 4910 - protein, 70 aa, Homo sapiens
MLGFLTFRSLTWIRLGAAQWSRWVPVSLVIRRGLGVGRAPESQQCAWAPTPSSTCHTSEGSYSCTQAVES

SEQ ID NO: 4911 - protein, 30 aa, Homo sapiens
MYIKSPCCACLIYVIFICQLCLTKACGWGE

SEQ ID NO: 4912 - protein, 20 aa, Homo sapiens
MLLLYFFQHIQPSPWGAFHI

SEQ ID NO: 4913 - protein, 18 aa, Homo sapiens
MFPSWPFLWLTLCSLCIC

SEQ ID NO: 4914 - protein, 42 aa, Homo sapiens
MEKCEKLNCLEMSRFFYLQLLLACPTVVFEYFLYSTPKDFNF

SEQ ID NO: 4915 - protein, 50 aa, Homo sapiens
MFYFMNLTKFFFLDLANFNRVFSYQTFTYLLKLHSCKLFGGICFYFYFVV

SEQ ID NO: 4916 - protein, 37 aa, Homo sapiens
LNDGLCWFFCLFGWFVCLFWHSVKGSQTFTYYLLSCP

SEQ ID NO: 4917 - protein, 37 aa, Homo sapiens; identical to SEQ ID NO: 4916

SEQ ID NO: 4918 - protein, 38 aa, Homo sapiens; identical to SEQ ID NO: 4680

SEQ ID NO: 4919 - protein, 34 aa, Homo sapiens
HLFYLGFIHLLECVGLHLLPKLGSFKAFFLQIYF

SEQ ID NO: 4920 - protein, 140 aa, Homo sapiens
SQLFGWLLIGVVAILVFLTKCLKHYCSPLSYRQEAYWAQYRANEDQLFQRTAEVHSRVLAANNVRRFFGFVALNKDDEELIANFPVEGTQPRPQWNAITGVYLYRENQGLPLYSRLHKWAQGLAGNGAAPDNVEMALLPS

SEQ ID NO: 4921 - protein, 11 aa, Homo sapiens
MQESPSQLLSS

SEQ ID NO: 4922 - protein, 33 aa, Homo sapiens
MQSVSFLVVSFLGQCFFVFFLEMFVLPPPVDPG

SEQ ID NO: 4923 - protein, 79 aa, Homo sapiens
MPLRRSGGFEYLSLPPIQEIQSLVSLSLSVSFFLFLPPNPSHSLPPSLLPLFAIIFSLCFFSLLPSLWAVMKINSDCVH

SEQ ID NO: 4924 - protein, 31 aa, Homo sapiens
MSGEDPLLSIPTCATPGSPCWGLLGPFSSCL

SEQ ID NO: 4925 - protein, 1 aa, Homo sapiens
I

SEQ ID NO: 4926 - protein, 23 aa, Homo sapiens
MSDPKENVFTLMLRCSAAPLCSV

SEQ ID NO: 4927 - protein, 35 aa, Homo sapiens
MFPNIMFCTLMLISLCVVPDTSWDLKKCCFFLKDG

SEQ ID NO: 4928 - protein, 9 aa, Homo sapiens
MVGSVDFSF

SEQ ID NO: 4929 - protein, 22 aa, Homo sapiens
MLLLGLEGLLFMLFNALSNVFF

SEQ ID NO: 4930 - protein, 3 aa, Homo sapiens
LLI

SEQ ID NO: 4931 - protein, 37 aa, Homo sapiens
MGIGALILLFFLTVVLPFYGFNQPPPPGKHLLWACWV

SEQ ID NO: 4932 - protein, 43 aa, Homo sapiens
MAVHHPAFQLNVTCLLLLKMAFCVLQRLAWEVLCSIAVNLDTF

SEQ ID NO: 4933 - protein, 52 aa, Homo sapiens
LPLEDLCKGGLGTKENVLFGRAGSKGTGQGLVGLGNGSLSWIPLMKRLGLFT

SEQ ID NO: 4934 - protein, 39 aa, Homo sapiens
MAARPLPVSPARALLARPGRCSARALRGPRGELMEPRKS

SEQ ID NO: 4935 - protein, 72 aa, Homo sapiens
MMPVCRVGLWNGSCLCVCVCIFMGMGACLVCICTCLYCCVPVNTCLCMDGRSQAQAWPLPRACGHTSCSSPK

SEQ ID NO: 4936 - protein, 11 aa, Homo sapiens
MHFHADYMHGC

SEQ ID NO: 4937 - protein, 31 aa, Homo sapiens
MGSYKGSTKKVKFILMTLKIYMFVLNVGRCQ

SEQ ID NO: 4938 - protein, 6 aa, Homo sapiens
MCSLPL

SEQ ID NO: 4939 - protein, 32 aa, Homo sapiens
MFLISIEIALLPHISLAYPWSLAILDKDMLFK

SEQ ID NO: 4940 - protein, 33 aa, Homo sapiens
MFLIIFISLNFSLCHSNLTFTHQQITMQKKKYF

SEQ ID NO: 4941 - protein, 53 aa, Homo sapiens
  SITE (8): Xaa equals any of the naturally occurring L-amino acids
MSHCLFLXFCLKIPSWKSCHAIGDCDILLVMYTATGFVCYVDGLYLCYSEGIK

SEQ ID NO: 4942 - protein, 97 aa, Homo sapiens
MAQPPQNLKRFSSCRAFARLGYPPYFPCLPSSAARPSVPASAQPSVKGSPASNLHCTASPKTVTSWKAGAQLPLNKRVAKKEKKKKKKKKKKKKKGR

SEQ ID NO: 4943 - protein, 22 aa, Homo sapiens
MTFFVFMEVRTPVMQTGSRSLL

SEQ ID NO: 4944 - protein, 7 aa, Homo sapiens
MKCILEF

SEQ ID NO: 4945 - protein, 30 aa, Homo sapiens
MYLFNNFFFSSWYLILVLLNQYSGTIVGVY

SEQ ID NO: 4946 - protein, 29 aa, Homo sapiens
MGARHCIWPFCRYFFPLSLIVPIDFSPFL

SEQ ID NO: 4947 - protein, 38 aa, Homo sapiens
MKETGLIAIILLLAAFSKSLFLKPPPILFKQIKTKISC

SEQ ID NO: 4948 - protein, 6 aa, Homo sapiens
IYSALD

SEQ ID NO: 4949 - protein, 34 aa, Homo sapiens
MRSFCFLGKVFHFLVWLFAHPRRRKTSLRVTFTW

SEQ ID NO: 4950 - protein, 34 aa, Homo sapiens
MRLCVFLALLHVPFQLMAHSDSQRFMPKLHTIVF

SEQ ID NO: 4951 - protein, 33 aa, Homo sapiens
MRLGAKTSLFFFSFLFLLVFAKLLLLKKGSYCY

SEQ ID NO: 4952 - protein, 71 aa, Homo sapiens [sequence omitted]

SEQ ID NO: 4953 - protein, 20 aa, Homo sapiens
MKLLALVISILICTGQIYNC

SEQ ID NO: 4954 - protein, 35 aa, Homo sapiens
MEAAKSLCPRAPLSCSALLLCSFCIVGEDGYHCVC

SEQ ID NO: 4955 - protein, 33 aa, Homo sapiens
MSEFLLLCIFPSIWYCQFKHKCWERYRATGTLT

SEQ ID NO: 4956 - protein, 49 aa, Homo sapiens
  SITE (8): Xaa equals any of the naturally occurring L-amino acids
  SITE (15): Xaa equals any of the naturally occurring L-amino acids
  SITE (16): Xaa equals any of the naturally occurring L-amino acids
YFTVIYFXFQLSIFXXSLSMGTYLPHFFRSDMTHKKDGFGFLKTLTISN

SEQ ID NO: 4957 - protein, 30 aa, Homo sapiens
MIFLFLFFVFCFLVSQYVSPFYSNTFFGVQ

SEQ ID NO: 4958 - protein, 29 aa, Homo sapiens
MCLPSDVTFPLLLLGMCLVPLSPAHVTVT

SEQ ID NO: 4959 - protein, 12 aa, Homo sapiens
MIVIVFYLINLL

SEQ ID NO: 4960 - protein, 81 aa, Homo sapiens
WGKILVVLMVNLSYWILCMPHSRIHCLSLIMDGMQQHPSILHSLQGKNCAWGLKCSMCSSISLSSVMQNGIFNGRSALLRC

SEQ ID NO: 4961 - protein, 520 aa, Homo sapiens
MVTSSFPISVAVFALITLQVGTQDSFIAAVYEHAVILPNKTETPVSQEDALNLMNENIDILETAIKQAAEQGARIIVTPEDALYGWKFTRETVFPYLEDIPDPQVNWIPCQDPHRFGHTPVQARLSCLAKDNSIYVLANLGDKKPCNSRDSTCPPNGYFQYNTNVVYNTEGKLVARYHKYHLYSEPQFNVPEKPELVTFNTAFGRFGIFTCFDIFFYDPGVTLVKDFHVDTILFPTAWMNVLPLLTAIEFHSAWAMGMGVNLLVANTHHVSLNMTGSGIYAPNGPKVYHYDMKTELGKLLLSEVDSHPLSSLAYPTAVNWNAYATTIKPFPVQKNTFRGFISRDGFNFTELFENAGNLTVCQKELCCHLSYRMLQKEENEVYVLGAFTGLHGRRRREYWQVCTMLKCKTTNLTTCGRPVETASTRFEMFSLSGTFGTEYVFPEVLLTEIHLSPGKFEVLKDGRLVNKNGSSGPILTVSLFGRWYTKDSLYSSCGTSNSAITYLLIFILLMIIALQNIVML

SEQ ID NO: 4962 - protein, 37 aa, Homo sapiens
MGLPVSWAPPALWVLGCCALLLSLWALCTACRRPRTL

SEQ ID NO: 4963 - protein, 35 aa, Homo sapiens
MNVSIFLVGLFLIIELYIAGSLTTSLEFQQEAFAR

SEQ ID NO: 4964 - protein, 47 aa, Homo sapiens
MLFLCNNWLVSLFCSLLIGSCFLCVQNKNKFGQKKKKKKKKKKKKKK

SEQ ID NO: 4965 - protein, 46 aa, Homo sapiens
MPEPLLGLSVVFTLVLGHPSFGRGGKAAGKMETVGGVCLPIGLALV

SEQ ID NO: 4966 - protein, 19 aa, Homo sapiens
MAWVGLASLGVCCPISRVP

SEQ ID NO: 4967 - protein, 34 aa, Homo sapiens
MCILVLVLSVIILILGLIIWLVYKTNDCLRSFSR

SEQ ID NO: 4968 - protein, 67 aa, Homo sapiens
PFLGWNQGAWVGVAAGNMPPCLALCRNPWKIRPSSLPLSASCTRARSRMSALPQPAPSGVFASSDGR

SEQ ID NO: 4969 - protein, 257 aa, Homo sapiens
MDFIQHLGVCCLVALISVGLLSVAACWFLPSIIAAAASWIITCVLLCCSKHARCFILLVFLSCGLREGRNALIAAGTGIVILGHVENIFHNFKGLLDGMTCNLRAKSFSIHFPLLKKYIEAIQWIYGLATPLSVFDDLVSWNQTLAVSLFSPSHVLEAQLNDSKGEVLSVLYQMATTTEVLSSLGQKLLAFAGLSLVLLGTGLFMKRFLGPCGWKYENIYITRQFVQFDERERHQQRPCVLPLNKEERRKFISGFQS

SEQ ID NO: 4970 - protein, 291 aa, Homo sapiens
MDFIQHLGVCCLVALISVGLLSVAACWFLPSIIAAAASWIITCVLLCCSKHARCFILLVFLSCGLREGRNALIAAGTGIVILGHVENIFHNFKGLLDGMTCNLRAKSFSIHFPLLKKYIEAIQWIYGLATPLSVFDDLVSWNQTLAVSLFSPSHVLEAQLNDSKGEVLSVLYQMATTTEVLSSLGQKLLAFAGLSLVLLGTGLFMKRFLGPCGWKYENIYITRQFVQFDERERHQQRPCMLPLNKEERRKNKELKILSMILPLIYLCLNPTVSQNQNSFYLRPGFLSVLFF

SEQ ID NO: 4971 - protein, 23 aa, Homo sapiens
MYIIAFNPLLTPPSTASPTAIGA

SEQ ID NO: 4972 - protein, 64 aa, Homo sapiens
  SITE (38): Xaa equals any of the naturally occurring L-amino acids
MWLLRQPCLAGFLLQVLEGRVPQSQAEADSGGLGAGGXTPAGGRRGLCQQSEQPRGPIPHILQV

SEQ ID NO: 4973 - protein, 64 aa, Homo sapiens
MNGFLPLWGWTLGLSWWERRRGLPPLSELPPTGGQESTLQPRALWGVHAWGLWVGTMDRPWSLS

SEQ ID NO: 4974 - protein, 23 aa, Homo sapiens
MLFLKVCLCLFKSYSMASWEALR

SEQ ID NO: 4975 - protein, 82 aa, Homo sapiens
MGLLLWGCFCTRGLPRCAPCLPPTWLSLLLGRTRPHVLRMLQKCGPWRDPKDTWHRPGRGRPRLVSAPFHGQTGLLSCTINL

SEQ ID NO: 4976 - protein, 31 aa, Homo sapiens
MESILMILILSVPTWRMHLLLLEVSAVAGLL

SEQ ID NO: 4977 - protein, 11 aa, Homo sapiens
QTALRRPHGPR

SEQ ID NO: 4978 - protein, 49 aa, Homo sapiens
RMLLLFIYLLVDGHLGWFHIFAIANCAAINMHVQVSFSNNDFFLLTPCS

SEQ ID NO: 4979 - protein, 26 aa, Homo sapiens
MFTLSLLFKLFRISFSLPFRRSVFTL

SEQ ID NO: 4980 - protein, 86 aa, Homo sapiens
MLSYSSAMFSQKKLITSSLLWLLQLQEVPAMSHVVFDQWSPVPGQRRQLYNVICVVKILPLTQNGTVQSLSVYMEKSHAPGLTQKK

SEQ ID NO: 4981 - protein, 58 aa, Homo sapiens [sequence omitted]

SEQ ID NO: 4982 - protein, 74 aa, Homo sapiens
MTVSLVSRSSVFNTCIYNAQARRPCHQPNVITAGRWKMSLKQSLCALFVLSLIQSNLKPQTDLPPVLFSGGFSP

SEQ ID NO: 4983 - protein, 82 aa, Homo sapiens
  SITE (71): Xaa equals any of the naturally occurring L-amino acids
MKWRCLMCFTLACLTVFYLTVNSAVFYCERKPQCLSSLRNWGERWTTTVVHFLSVLGECHTFPSQSKRNLXEILRETVSPQV

SEQ ID NO: 4984 - protein, 44 aa, Homo sapiens
KFMLCVSMVCFILLLSILLYEYTKICVSVHRLIDIWVITTLKLL

SEQ ID NO: 4985 - protein, 32 aa, Homo sapiens
MVRILSMVVIIIIIINGSPLCVLSYFIFTIFT

SEQ ID NO: 4986 - protein, 28 aa, Homo sapiens
MMGIWGIERSWVGNIAWVISLLTLYCKV

SEQ ID NO: 4987 - protein, 137 aa, Homo sapiens
ITHHAVILFVLVPVAQRLRGDLGDFFVGCIFTAELSTPFVSLGRVLIQLKQQHTLLYKVNGILTLATFLSCRILLFPFMYWSYGRQQGLSLLQVPFSIPFYCNVANAFLVAPQIYWFCLLCRKAVRLFDTPQAKKDG

SEQ ID NO: 4988 - protein, 42 aa, Homo sapiens
LFLFFLSPSDFSAYHLHFSPLTHSELIESCFCHHHTTETGHR

SEQ ID NO: 4989 - protein, 38 aa, Homo sapiens
MVIFCSLLSLIAYSIMAFLKKNLCIFSHPYLFAYFSNH

SEQ ID NO: 4990 - protein, 32 aa, Homo sapiens
MYYISTFLILTWAYALSLIVINLCCSSICNTL

SEQ ID NO: 4991 - protein, 42 aa, Homo sapiens
MNSNRLELLLYITQLALCTCRFCILGFNCGSKIFGGKKAIQQ

SEQ ID NO: 4992 - protein, 36 aa, Homo sapiens
MGSIAGTQGCRPRRLFFLFSLCRLISSLSVIWFPCP

SEQ ID NO: 4993 - protein, 50 aa, Homo sapiens
MWNIFSYVCWLLVCLLLRSVCSCLLPSFKWDLFFACSLVHTFFFFIDSGC

SEQ ID NO: 4994 - protein, 20 aa, Homo sapiens
SGEGAWVPGASLALHQDPVE

SEQ ID NO: 4995 - protein, 11 aa, Homo sapiens
MVLFLLRFLFL

SEQ ID NO: 4996 - protein, 15 aa, Homo sapiens
METHRQQLRKMVCQQ

SEQ ID NO: 4997 - protein, 36 aa, Homo sapiens
MLSDWLIIVLQCYVQVTLILLIVVPRCKSSDADILL

SEQ ID NO: 4998 - protein, 26 aa, Homo sapiens
MTSRWCHLKEPRFLFSVCGFILLVLL

SEQ ID NO: 4999 - protein, 38 aa, Homo sapiens
MISCLNILRVLYLLWGLLALSALTQIIGYITWLMFLYT

SEQ ID NO: 5000 - protein, 58 aa, Homo sapiens
MLRQEICLIRTGSSVLSVTLVALLLQVITLVMYMTLRSKRGLLTMTWRYQKSKRLPCK

SEQ ID NO: 5001 - protein, 52 aa, Homo sapiens
TQSLDPDETSPPPHLCPHQDKELLPVFPLGHGASCPPSSPARDPKAGTTPPA

SEQ ID NO: 5002 - protein, 23 aa, Homo sapiens
MLLLQSLFFSHELGVGWGREREG

SEQ ID NO: 5003 - protein, 21 aa, Homo sapiens
MPCFSLLSLPLWDPLVILVFC

SEQ ID NO: 5004 - protein, 44 aa, Homo sapiens
MPRTSTFQQWLSSPTFWWLVLRWGPRIGSPQTSWGCKRAQPWPG

SEQ ID NO: 5005 - protein, 15 aa, Homo sapiens
MLLRVFLVVVTQCGC

SEQ ID NO: 5006 - protein, 33 aa, Homo sapiens
MSDRWSPFIPFLLLAPVSSGSGHLTFSCPAGSA

SEQ ID NO: 5007 - protein, 52 aa, Homo sapiens
MAMAMARITPPTMGMVWPLHTLGKCLALTQMQTLVPRVAPVPIPFYPELTSA

SEQ ID NO: 5008 - protein, 39 aa, Homo sapiens [sequence omitted]

SEQ ID NO: 5009 - protein, 36 aa, Homo sapiens
MLLLYLSSFTFLESPTTGQRLKGTDLLCRMAWPPLK

SEQ ID NO: 5010 - protein, 35 aa, Homo sapiens
MLSIMLCFLWNMIILLVASSAYSGCDLALPGTSAL

SEQ ID NO: 5011 - protein, 38 aa, Homo sapiens
MGKSVLLGSIYYLLLSSHLCKSAISTKMCDRRSQRILL

SEQ ID NO: 5012 - protein, 41 aa, Homo sapiens
MYMKMMFMLFIILPFIISFFIVLIAMSFSSLIFFPQCLICH

SEQ ID NO: 5013 - protein, 24 aa, Homo sapiens
MAASALLLCVVTLILFLVLHYIVS

SEQ ID NO: 5014 - protein, 8 aa, Homo sapiens
MSNVQLQR

SEQ ID NO: 5015 - protein, 24 aa, Homo sapiens
SFFVFLGDLYFFFGEMSIPILAHF

SEQ ID NO: 5016 - protein, 16 aa, Homo sapiens
GPCDPISWLLRLLSLF

SEQ ID NO: 5017 - protein, 65 aa, Homo sapiens
GSFPSPKHRQRGGEQFLVLFLFLKWCLYLQPPGGLPWPHFSAPPRHRHPSTLLHVTRKMPFAECT

SEQ ID NO: 5018 - protein, 90 aa, Homo sapiens
MCPVSQFPGSSSVCCPFSSSGSIVREPRMEAKCTGHWLFFQCPSDSPCPGGLVPSLSVWCLFYKLVMTSGNGPGFQIAIPGDILILWFKP

SEQ ID NO: 5019 - protein, 33 aa, Homo sapiens
MYYFIFLFFSYVLCFRIFLEASSKSCFVGNKQS

SEQ ID NO: 5020 - protein, 40 aa, Homo sapiens
IDFFLFPTISSASPFSSFKINPESDHCGLNHYYILPELLQ

SEQ ID NO: 5021 - protein, 35 aa, Homo sapiens
MGWVIALCSQLSRLLTLFLLRLFLNRKIRILSFQQ

SEQ ID NO: 5022 - protein, 34 aa, Homo sapiens
MGLLLWLSVGHTSPQKAPAKELRFWLGKNITPLQ

SEQ ID NO: 5023 - protein, 15 aa, Homo sapiens
MPALIDGAERHCIPI

SEQ ID NO: 5024 - protein, 37 aa, Homo sapiens
MLLIFTFSALVLSYPLLILGDWVEMAIEHHTLLTKTI

SEQ ID NO: 5025 - protein, 30 aa, Homo sapiens
MALVGLLSAGVPGVSLCVQIFSYKDTGEIG

SEQ ID NO: 5026 - protein, 2 aa, Homo sapiens
ML

SEQ ID NO: 5027 - protein, 39 aa, Homo sapiens
MFFHFGVNIAWIFFLVPRLAFSSGNLAVKINLFQMKYCI

SEQ ID NO: 5028 - protein, 12 aa, Homo sapiens
VLLLPHVLSGGL

SEQ ID NO: 5029 - protein, 35 aa, Homo sapiens
LIVFHIIFIPWITLLCVFIGVRLLAVSYETTYYIF

SEQ ID NO: 5030 - protein, 19 aa, Homo sapiens
MTSYCSFDLHFSDDNYVEH

SEQ ID NO: 5031 - protein, 34 aa, Homo sapiens
MNFWHSCYLLRNCTVCFLCSIFFFFPGMRMYLSS

SEQ ID NO: 5032 - protein, 34 aa, Homo sapiens
MKLTLGTAGSLFPQALYILLDFIWVNFIDGSHYI

SEQ ID NO: 5033 - protein, 48 aa, Homo sapiens [sequence omitted]

SEQ ID NO: 5034 - protein, 9 aa, Homo sapiens
MNKIKKWLI

SEQ ID NO: 5035 - protein, 35 aa, Homo sapiens
MLGSSPLMLIWATTFVRSSIACSLSALFSPRNTFL

SEQ ID NO: 5036 - protein, 22 aa, Homo sapiens
MVRLSSLQTLLCPDSHLGHFIQ

SEQ ID NO: 5037 - protein, 20 aa, Homo sapiens
MELFFFWLTILLFPTVFNNC

SEQ ID NO: 5038 - protein, 41 aa, Homo sapiens
MGNVMVTFSRLSCLIPSASSLLCLNSCTGCLVHVHITKRWY

SEQ ID NO: 5039 - protein, 37 aa, Homo sapiens
MKSALRLVLLFSFHFFPLIISFRRKREGKKKKKIRDL

SEQ ID NO: 5040 - protein, 44 aa, Homo sapiens
MNHTLRNQCGCPLRVLLFFLLPLSKIRYSVIKYISIKVFKSDLY

SEQ ID NO: 5041 - protein, 40 aa, Homo sapiens
MSKGLRKESHVFFLLFSNLVITKQCYQCITYKHFIIHFHF

SEQ ID NO: 5042 - protein, 50 aa, Homo sapiens
MLTFLVWQAELVLLPTLPFPIVTIYRTSHCCLLCVASASLPGRSRNLRIS

SEQ ID NO: 5043 - protein, 42 aa, Homo sapiens
ALETVVHFILLSLLVFMYDLLIGKNLIMVSLMTNQFVLNTFY

SEQ ID NO: 5044 - protein, 17 aa, Homo sapiens
MVITVATLVSLLIDASG

SEQ ID NO: 5045 - protein, 6 aa, Homo sapiens
STILCF

SEQ ID NO: 5046 - protein, 33 aa, Homo sapiens
MEIIYVTLLINVVVVHACNSWRSLRQMSPKYST

SEQ ID NO: 5047 - protein, 20 aa, Homo sapiens
MTRGTLPPTLLGLSFLSSQL

SEQ ID NO: 5048 - protein, 138 aa, Homo sapiens
MEKINFLVEIQWLTKPSLILSQPAQLRPVRRLPATITRLAVAMTPGQPGVPPNLGTGKAQKAGGPSQRGLEPKETQTLPTTGTLPSATPRPTKDQQLVMMMTGMKTGMGPNPLPTLRIQSQLMQAALSEETVVLVPHP

SEQ ID NO: 5049 - protein, 58 aa, Homo sapiens [sequence omitted]

SEQ ID NO: 5050 - protein, 5 aa, Homo sapiens
MRECS

SEQ ID NO: 5051 - protein, 29 aa, Homo sapiens
MAGLVLVFLGILLFEAQHSQRNPQDAAGR

SEQ ID NO: 5052 - protein, 3 aa, Homo sapiens
PPR

SEQ ID NO: 5053 - protein, 12 aa, Homo sapiens
MKLLIVIFFHFL

SEQ ID NO: 5054 - protein, 62 aa, Homo sapiens
MLFSLLHLGFCAYESNLILFQMAIPIPGQLVKKSFFPSLIWVAGTGPVPVSSGAYPTLFSLQ

SEQ ID NO: 5055 - protein, 4 aa, Homo sapiens
QVWL

SEQ ID NO: 5056 - protein, 46 aa, Homo sapiens
TRQRLKALSLRNCVTLVTLFDFSLLKFSHMGMVRKIPTSQDFLTIL

SEQ ID NO: 5057 - protein, 34 aa, Homo sapiens
MAALLLPLHLCLCAPDVSLCVSKHHLIRTPVGTD

SEQ ID NO: 5058 - protein, 24 aa, Homo sapiens
MSITLLFAVLTLLCNGTPELILPV

SEQ ID NO: 5059 - protein, 35 aa, Homo sapiens
MKHFCNLLCILMFCNQQSVCDPPSQNNAGKINLRY

SEQ ID NO: 5060 - protein, 35 aa, Homo sapiens
MLGSKASLRILLCLFFFLPRHSSSDNCCPSCTAGG

SEQ ID NO: 5061 - protein, 24 aa, Homo sapiens
FWWVCGLAGFRSEATDLHGECCSS

SEQ ID NO: 5062 - protein, 28 aa, Homo sapiens
KKISLSLLFFCSLLKSKQNLLLSPVNTT

SEQ ID NO: 5063 - protein, 21 aa, Homo sapiens
MRREPKAQLSVSCLAAMSFLY

SEQ ID NO: 5064 - protein, 17 aa, Homo sapiens
  SITE (9): Xaa equals any of the naturally occurring L-amino acids
GVVAVVVFXFSSLLFRF

SEQ ID NO: 5065 - protein, 10 aa, Homo sapiens
LVLFVIKGTI

SEQ ID NO: 5066 - protein, 28 aa, Homo sapiens
MFGWCHHLFFCMLFSLWRGHLCVYRRKM

SEQ ID NO: 5067 - protein, 31 aa, Homo sapiens
MRGAWCVCLCVCVYGYNSFIFVASERLCRAL

SEQ ID NO: 5068 - protein, 37 aa, Homo sapiens
HLPSIIPVLVYVLPKRAWKFILAVSLCWADYPIKVPL

SEQ ID NO: 5069 - protein, 177 aa, Homo sapiens
MGLMKANHVFFLLYLLHILLLDGAAWLTLWVFGTSFLPFLLCAVLLSAVQAQAGWLQHDFGHLSVFSTSKWNHLLHHFVIGHLKGAPASWWNHMHFQHHAKPNCFRKDPDINMHPFFFALGKILSVELGKQKKKYMPYNHQHKYFFLIGPPALLPLYFQWYIFYFVIQRKNGWTWPG

SEQ ID NO: 5070 - protein, 93 aa, Homo sapiens
MESQYVSFCVWLLSLSVLFSKSIRAAPYMSALFHPCCTIHERFIPSMLCHTSALYSIHAVPYISALFHPCCTIHERFIPSVLHHTSVLYSFSG

SEQ ID NO: 5071 - protein, 13 aa, Homo sapiens
PSLVSCASLLTVM

SEQ ID NO: 5072 - protein, 24 aa, Homo sapiens
MHYILKYSMTGFCPCLWAFIFLMG

SEQ ID NO: 5073 - protein, 27 aa, Homo sapiens
MCIILLVVVFHKSQFSSLVVGPKSSVS

SEQ ID NO: 5074 - protein, 18 aa, Homo sapiens
MTTWPIRPGIFAVWLYAV

SEQ ID NO: 5075 - protein, 54 aa, Homo sapiens
  SITE (16): Xaa equals any of the naturally occurring L-amino acids
  SITE (25): Xaa equals any of the naturally occurring L-amino acids
  SITE (43): Xaa equals any of the naturally occurring L-amino acids
MHYVCSFLKKILIVFXCSVPCLFSXVCPVTLSILDYKLIKALXMLFSLFLNLNI

SEQ ID NO: 5076 - protein, 78 aa, Homo sapiens
MYLLSTYLLWCSTLVTASYLNFPRVVPYSVFSDMVFQSVCVTYLLFISHCRWLCLLHHHKKFKLCALINCVLLKRLVG

SEQ ID NO: 5077 - protein, 3 aa, Homo sapiens
LNL

SEQ ID NO: 5078 - protein, 33 aa, Homo sapiens
MLGSLMARLNMLVPSSWAGSLASAPMIATAAIK

SEQ ID NO: 5079 - protein, 37 aa, Homo sapiens
MANLPLILIMLVVGMMGVTINTLSTHVQTLFQAVFIY

SEQ ID NO: 5080 - protein, 38 aa, Homo sapiens
MKKPSASKMHTLILPIALLLAGPVQLTHFSGTAADSLL

SEQ ID NO: 5081 - protein, 22 aa, Homo sapiens
MATHLFIYLLVAVFCYSCSVLY

SEQ ID NO: 5082 - protein, 12 aa, Homo sapiens
RLCRSFTFCFCS

SEQ ID NO: 5083 - protein, 53 aa, Homo sapiens
MRIVSDSCFSFPFSPPLSDTYTPRPHHTYAHCGLHHSHSLYFVNLAARKFLSP

SEQ ID NO: 5084 - protein, 64 aa, Homo sapiens [sequence omitted]

SEQ ID NO: 5085 - protein, 38 aa, Homo sapiens
MTSARKACFCFMWSLILQHAHSTCSWLGKVPTDIYKAS

SEQ ID NO: 5086 - protein, 21 aa, Homo sapiens
MILFFCWAPICFFLCNESLKE

SEQ ID NO: 5087 - protein, 26 aa, Homo sapiens
MPPGCLAVTECLFLLAYWSHVIFVTW

SEQ ID NO: 5088 - protein, 10 aa, Homo sapiens
MIHTPHNSPI

SEQ ID NO: 5089 - protein, 69 aa, Homo sapiens
  SITE (52): Xaa equals any of the naturally occurring L-amino acids
MSERHGPSPQSVLLSLWFVLTLTPFLFLTLLSCMEHTAPAPFQSAWQTPGLXRSSSFCVPFRSSLCSVR

SEQ ID NO: 5090 - protein, 30 aa, Homo sapiens
MRAELHGLVCLSAVSTMTAAVSGTEMPNIC

SEQ ID NO: 5091 - protein, 31 aa, Homo sapiens
DTLLSPWLLVWYVRLPAVFPFLNSTAGSSLK

SEQ ID NO: 5092 - protein, 46 aa, Homo sapiens
MASSVTTISLLLLASFTSLSCVWYFMFSCQDCVDLQILSLPDEVIC

SEQ ID NO: 5093 - protein, 34 aa, Homo sapiens
MAIHIWTMYFRLLHLYTLVPSAGGWGVCACIPRQ

SEQ ID NO: 5094 - protein, 32 aa, Homo sapiens
DFLLLIEWFISLKTFEMAHELLGQIMETSTLL

SEQ ID NO: 5095 - protein, 33 aa, Homo sapiens
MPILSHWTYVDWFLLLLCTYKYIYKMNIVHAFR

SEQ ID NO: 5096 - protein, 26 aa, Homo sapiens
  SITE (2): Xaa equals any of the naturally occurring L-amino acids
MXWLKLSFFVWAPVLTVLQCSWQVEW

SEQ ID NO: 5097 - protein, 32 aa, Homo sapiens
MNHLLILLTKHLIHTQMLEFPLYKCSHAIQLF

SEQ ID NO: 5098 - protein, 119 aa, Homo sapiens
MCYRRSLLKVLMSIYLLYKAIYATGSLKIQYCSSSKRSTKPRVSSLISLYSKNDPSMGWLNTDIEGILPQKIHLFVAGNFPLLSCVISFLLLATTHHWGLWKIIFLFGNEWKSKRPYYF

SEQ ID NO: 5099 - protein, 17 aa, Homo sapiens
MTKSVFFSFLSLSLSLG

SEQ ID NO: 5100 - protein, 56 aa, Homo sapiens
MWKENISFSFFIKIQVILLLYEQFFLIGHVAKNTAYSKCVSCCHDVYPYNNSVTKV

SEQ ID NO: 5101 - protein, 89 aa, Homo sapiens
LGLWPIWYASCVCMVCAVSLHLFYTSWGHGPQLLDRTLFSNPALGDQPSLANICMFSYSCLLKGPTQRLDFLLPLCVGTVCDICKKCAN

SEQ ID NO: 5102 - protein, 30 aa, Homo sapiens
MNASILYLCLVSFCLSIQEAFIKGPPCASH

SEQ ID NO: 5103 - protein, 40 aa, Homo sapiens
LRVATLPGVPLPRDYGQGPGAGRAAGADTGAAPESGNSAS

SEQ ID NO: 5104 - protein, 36 aa, Homo sapiens
MMDALVFLPWFVSSTRACAPRICCNLILVKRPSVSS

SEQ ID NO: 5105 - protein, 40 aa, Homo sapiens [sequence omitted]

SEQ ID NO: 5106 - protein, 22 aa, Homo sapiens
MLLSPFIFCFFLITVGLIENWS

SEQ ID NO: 5107 - protein, 65 aa, Homo sapiens
MNLSKAPALRFLWSCSSITGAAGNLNTTSWSTRLWPNGRRKKLSSGWSSWALGHLFTGKGFYLNE

SEQ ID NO: 5108 - protein, 34 aa, Homo sapiens
MVYRIQHADTWWDLLLLGFCYTRVSVVSASIYVC

SEQ ID NO: 5109 - protein, 47 aa, Homo sapiens
MVYRIQHADTWWTYCYWGFVILGFQWSVLVFMYVNPRCALDSGYFKF

SEQ ID NO: 5110 - protein, 2 aa, Homo sapiens
MV

SEQ ID NO: 5111 - protein, 85 aa, Homo sapiens
MPWLNQVLRAASLSPRCLVWVPVLGFLGPGLPPVLQTFPTGNPGYHPCPPEELPPPGLSPVGPGGAGGTTGTCGAWECLSCCIGP

SEQ ID NO: 5112 - protein, 144 aa, Homo sapiens
  SITE (77): Xaa equals any of the naturally occurring L-amino acids
SVLWNAMIHPLCNMTLKGVVWYQGESNINYNTDLYNCTFPALIEDWRETFHRGSQGQTERFFPFGLVQLSSDLSKKXSDDGFPQIRWHQTADFGYVPNPKMPNTFMAVAMDLCDRDSPFGSIHPRDKQNCGLSAAFGGPCSGLW

SEQ ID NO: 5113 - protein, 13 aa, Homo sapiens
MSPTQRCPILSWL

SEQ ID NO: 5114 - protein, 26 aa, Homo sapiens
MMMLTLYYCKINVVYISLCTAIFCFW

SEQ ID NO: 5115 - protein, 40 aa, Homo sapiens
MSAALLSSSLCWLRTLAYRPTNNQEAALVGTHCSKQGKQV

SEQ ID NO: 5116 - protein, 20 aa, Homo sapiens
MHVSVFVLMLLLPWQRKKKE

SEQ ID NO: 5117 - protein, 63 aa, Homo sapiens
MECSLTLAGLTLALPVGLPAAKTESLHCSFSPVTRPVYGPNGHASENLPWPLSKPSPGCNPCF

SEQ ID NO: 5118 - protein, 6 aa, Homo sapiens
ASCLCV

SEQ ID NO: 5119 - protein, 33 aa, Homo sapiens
MLRFCMLLQVLFHMCVCGVDVELLTTAAITYCS

SEQ ID NO: 5120 - protein, 13 aa, Homo sapiens
FFFFFFSQRLTKL

SEQ ID NO: 5121 - protein, 40 aa, Homo sapiens
MRRNMMNPLTFMLLGCACLRWLHLNILTRSAKMLRRSTVA

SEQ ID NO: 5122 - protein, 14 aa, Homo sapiens
  SITE (12): Xaa equals any of the naturally occurring L-amino acids
MSRVQSWCPAWXRW

SEQ ID NO: 5123 - protein, 207 aa, Homo sapiens
  SITE (170): Xaa equals any of the naturally occurring L-amino acids
ARAAVVVPAEWIKNWEKSGRGEFLHLCRILSENKSHDSSTYRDFQQALYELSYHVIKGNLKHEQASNVLSDISEFREDMPSILADVFCILDIETNCLEEKSKRDYFTQLVLACLYLVSDTVLKERLDPETLESLGLIKQSQQFNQKSVKIKTKLFYKQQKFNLLREENEXYAKLIAELGQDLSGSITSDLILENIKSLIGCFNLGSQ

SEQ ID NO: 5124 - protein, 33 aa, Homo sapiens
MLLLTMGFIQILPVFLLVYFFYSRVQSKIPHCI

SEQ ID NO: 5125 - protein, 8 aa, Homo sapiens
MGLVLEWC

SEQ ID NO: 5126 - protein, 36 aa, Homo sapiens
MFLLAILLPVFLVAWGGKTKESGWRAEGCRAVTLLL

SEQ ID NO: 5127 - protein, 29 aa, Homo sapiens
MAFLTMRILFFAYSFSKKHFLMEISEHGH

SEQ ID NO: 5128 - protein, 28 aa, Homo sapiens
MPVTELLQLLLLTQKMKRLLDWQQNKVE

SEQ ID NO: 5129 - protein, 61 aa, Homo sapiens [sequence omitted]

SEQ ID NO: 5130 - protein, 31 aa, Homo sapiens
MGRCVWMHFSCSCCFAFPDSTIPRGRGWSIL

SEQ ID NO: 5131 - protein, 338 aa, Homo sapiens
MANDPLEGFHEVNLASPTSPDLLGVYESGTQEQTTSPSVIYRPHPSALSSVPIQANALDVSELPTQPVYSSPRRLNCAEISSISFHVTDPAPCSTSGVTAGLTKLTTRKDNYNAEREFLQGATITEACDGSDDIFGLSTDSLSRLRSPSVLEVREKGYERLKEELAKAQRELKLKDEECERLSKVRDQLGQELEELTASLFEEAHKMVREANIKQATAEKQLKEAQGKIDVLQAEVAALKTLVLSSSPTSPTQEPLPGGKTPFKKGHTRNKSTSSAMSGSHQDLSVIQPIVKDCKEADLSLYNEFRLWKDEPTMDRTVSFLRQNLPGRYLSMFNILKK

SEQ ID NO: 5132 - protein, 17 aa, Homo sapiens
MMRLLLWLMIPWKASMK

SEQ ID NO: 5133 - protein, 54 aa, Homo sapiens [sequence omitted]

SEQ ID NO: 5134 - protein, 379 aa, Homo sapiens
MGYARKVGWVTAGLVIGAGACYCIYRLTRGRKQNKEKMAEGGSGDVDDAGDCSGARYNDWSDDDDDSNESKSIVWYPPWARIGTEAGTRARARARARATRARRAVQKRASPNSDDTVLSPQELQKVLCLVEMSEKPYILEAALIALGNNAAYAFNRDIIRDLGGLPIVAKILNTRDPIVKEKALIVLNNLSVNAENQRRLKVYMNQVCDDTITSRLNSSVQLAGLRLLTNMTVTNEYQHMLANSISDFFRLFSAGNEETKLQVLKLLLNLAENPAMTRELLRAQVPSSLGSLFNKKENKEVILKLLVIFENINDNFKWEENEPTQNQFGEGSLFFFLKEFQVCADKVLGIESHHDFLVKVKVGKFMAKLAEHMFPKSQE

SEQ ID NO: 5135 - protein, 188 aa, Homo sapiens
QGSRELLLALSWLLARGPVPEQMLAQARVPLGDEMTVCQCEALASPGPPAPHMEAEGPVDVRHVQWLMGKLRFRWRQLVSSQQEQCALLSKIHLYTRGCHSDQSLSHLSVTEAEMLRGPRGRPAAAAGLWSVRTSAWRLSWRGGALSWSSGGGWTRSWAPVPRRCLLQPHSPPPCPGSPSAGVASWTW

SEQ ID NO: 5136 - protein, 16 aa, Homo sapiens
LTGVGLSSLCSWQCSH

SEQ ID NO: 5137 - protein, 34 aa, Homo sapiens
MHVFHSSPLPVYSGGWCSLLVLLSLAERTMGSST

SEQ ID NO: 5138 - protein, 12 aa, Homo sapiens
HLLFLLLCFTCK

SEQ ID NO: 5139 - protein, 63 aa, Homo sapiens
MSWAPLQPGVCSCGVEVGGAGRDLQGSSCEGDSAATCRTLPLCLLPAWNMDVMAGAGTAVLRA

SEQ ID NO: 5140 - protein, 318 aa, Homo sapiens
MAPWAEAEHSALNPLRAVWLTLTAAFLLTLLLQLLPPGLLPGCAIFQDLIRYGKTKCGEPSRPAACRAFDVPKRYFSHFYIISVLWNGFLLWCLTQSLFLGAPFPSWLHGLLRILGAAQFQGGELALSAFLVLVFLWLHSLRRLFECLYVSVFSNVMIHVVQYCFGLVYYVLVGLTVLSQVPMDGRNAYITGKNLLMQARWFHILGMMMFIWSSAHQYKCHVILGNLRKNKAGVVIHCNHRIPFGDWFEYVSSPNYLAELMIYVSMAVTFGFHNLTWWLVVTNVFFNQALSAFLSHQFYKSKFVSYPKHRKAFLPFLF

SEQ ID NO: 5141 - protein, 36 aa, Homo sapiens
MDLKGRTKCSQYFLLSVVLLLSMGIVGSIIETLGKL

SEQ ID NO: 5142 - protein, 109 aa, Homo sapiens
MELTIFILRLAIYILTFPLYLLNFLGLWSWICKKWFPYFLVRFTVIYNEQMASKKRELFSNLQEFAGPSGKLSLLEVGCGTGANFKTPSQKKKKKKRSRDRETGSHCVA

SEQ ID NO: 5143 - protein, 32 aa, Homo sapiens
MMVIIVKKILLIVLRESTTLCQIPCFFLKPLK

SEQ ID NO: 5144 - protein, 73 aa, Homo sapiens [sequence omitted]

SEQ ID NO: 5145 - protein, 34 aa, Homo sapiens
MIAQLQSPCSFYLIMLALFSMSVWTHIKTPSCTL

SEQ ID NO: 5146 - protein, 69 aa, Homo sapiens
MASLWLVSWDLLLLLSHDCRLARIWLWMAWTQASRSSYVVASKCHVWPVADTIIKLLVLFFFRCFFLLA

SEQ ID NO: 5147 - protein, 98 aa, Homo sapiens
MLAMKLLVLWTVVCPQLVFLQKQLHKTTPNLPQSSQELVSDQRVRQSPRPQKLLFLPAPRQFHRLPSRGRTTAKVSSSTSGTKWSWGLCYGTSLTECQ

SEQ ID NO: 5148 - protein, 38 aa, Homo sapiens
MSVCVLYLQSLVIVPYITCKQILYFILAYLTEHITQKK

SEQ ID NO: 5149 - protein, 46 aa, Homo sapiens
MPGKQDWLFLQKNRTVPYIWPVQLVYLMPMFLLRVMHAYHLFQRRD

SEQ ID NO: 5150 - protein, 38 aa, Homo sapiens
MCHHTQLSSFLLNFFSEFSTLLVLTAISMFCFSLVTYA

SEQ ID NO: 5151 - protein, 23 aa, Homo sapiens
MFVAVFLFCFVFCKFHSAISVFN

SEQ ID NO: 5152 - protein, 217 aa, Homo sapiens
  SITE (156): Xaa equals any of the naturally occurring L-amino acids
  SITE (196): Xaa equals any of the naturally occurring L-amino acids
  SITE (211): Xaa equals any of the naturally occurring L-amino acids
MLPVVWIILCSSAQFPHLWKLHSHLAQMSHSSLLPLENRSLSLCRTRCSDPLSCTLAPFLPPTVSLSTLSSALQSSFCSFFLRRQCRPSCSPVPGVHISNFGSASWTCPCGCLAIHSNPASPKGMILPYFLLTQLCGQSSRTNGSKLPPNTHPRLXAWAPLASPRAAHIKVQLGSELLQEASPALLCRRTLLLHTXSPILWQALLYPQASXQTSLTC

SEQ ID NO: 5153 - protein, 35 aa, Homo sapiens
MMSTSQTAPLWCLWPPSRMTLAVSLSPASRRRGSR

SEQ ID NO: 5154 - protein, 40 aa, Homo sapiens
MKHFLFFSFLAFLSLYLMYTWKLQGLSTGHASLYRSHLCL

SEQ ID NO: 5155 - protein, 35 aa, Homo sapiens
MENMYWGPLGLTSEIVLFILLHLAFQLMEKYKFKF

SEQ ID NO: 5156 - protein, 34 aa, Homo sapiens
QKLLLFYAQSDIESFHLFLSPLLLLSDMLLQFLT

SEQ ID NO: 5157 - protein, 44 aa, Homo sapiens
GLGSGEWFPALQLMWLLRGTQALFHYLPNNGGPVFNCSTTTQNT

SEQ ID NO: 5158 - protein, 31 aa, Homo sapiens
MLLRVRRVGIICHLEFLCLADLSSDLPIYQR

SEQ ID NO: 5159 - protein, 46 aa, Homo sapiens
MSPGGFLLLTSLGPTIGFLAGLRSLREVAISKRKDFYLRLSGKEAE

SEQ ID NO: 5160 - protein, 23 aa, Homo sapiens
MSQSLIINLFLCIYILLVLSGEP

SEQ ID NO: 5161 - protein, 46 aa, Homo sapiens
MMILFCQLLAVSWGCCVYSTTNPKVSAIHCGFIEHLLVCACVGGGI

SEQ ID NO: 5162 - protein, 48 aa, Homo sapiens
MCVQKRQLPIGPRSHFLMVLILFMQPVPFVHISWLVNKATSDLFFKDL

SEQ ID NO: 5163 - protein, 37 aa, Homo sapiens
  SITE (2): Xaa equals any of the naturally occurring L-amino acids
MXFWAAMGLLEHWCVHLHSMCWNPQESGGAHIQGKVS

SEQ ID NO: 5164 - protein, 37 aa, Homo sapiens; identical to SEQ ID NO: 5163
  SITE (2): Xaa equals any of the naturally occurring L-amino acids

SEQ ID NO: 5165 - protein, 59 aa, Homo sapiens
MLARLRQVSTLCCLSLAQTGHFVWLFPSTRPQWEQASLPQASETDHPIPPSPVNLPLFP

SEQ ID NO: 5166 - protein, 24 aa, Homo sapiens
LFHITEWDLCFEETNPTDTLILDF

SEQ ID NO: 5167 - protein, 56 aa, Homo sapiens
MKSHSVWLPTLYCAVVKVYLCVGCSHPLVSTGIGPRSLHRSPAGMPVSHSAPCKTH

SEQ ID NO: 5168 - protein, 52 aa, Homo sapiens
MILMSLLPIFWLVTPLHIISSSPFVLCVLWGVCVCVCVCVVGEGCFRNEREK

SEQ ID NO: 5169 - protein, 477 aa, Homo sapiens
  SITE (19): Xaa equals any of the naturally occurring L-amino acids
  SITE (64): Xaa equals any of the naturally occurring L-amino acids
  SITE (73): Xaa equals any of the naturally occurring L-amino acids
  SITE (76): Xaa equals any of the naturally occurring L-amino acids
  SITE (90): Xaa equals any of the naturally occurring L-amino acids
  SITE (112): Xaa equals any of the naturally occurring L-amino acids
  SITE (141): Xaa equals any of the naturally occurring L-amino acids
  SITE (181): Xaa equals any of the naturally occurring L-amino acids
  SITE (341): Xaa equals any of the naturally occurring L-amino acids
MALRHSACRRFSLAEFAQXQARARHEKLRQRLKEEKLEMLQWKLSAAGVPQAEAGLPPVVDAIXDASVEEDLXVAXAGGRLEEVSFLQPXPARRRRALLRASGVRRIDREEXRELQALRQSREDCGCHCDRICDPETCSCXLAGIKCQMDHTAFPCGCCREGCENPMGRVEFNQARVQTHXIHTLTRLQLEQEAESFRELEAPAQGSPPSPGEEALVPTFPLAKPPMNNELGDNSCSSDMTDSSTASSSASGTSEAPDCPTHPGLPGPGFQPGVDDDSLARILSFSDSDFGGEEEEEEEGSVGNLDNLSCFHPADIFGTSDPGGLASWTHSYSGCSFTSGXLDENANLDASCFLNGGLEGSREGSLPGTSVPPSMDAGRSSSVDLSLSSCDSFELLQALPDYSLGPHYTSQKVSDSLDNIEAPHFPLPGLSPPGDASSCFLESLMGFSEPAAEALDPFIDSQFEDTVPASLMEPVPV

SEQ ID NO: 5170 - protein, 8 aa, Homo sapiens
GGLWLSLR

SEQ ID NO: 5171 - protein, 2 aa, Homo sapiens
SL

SEQ ID NO: 5172 - protein, 17 aa, Homo sapiens
LIFIVFHTSSQSLPGTW

SEQ ID NO: 5173 - protein, 18 aa, Homo sapiens
  SITE (5): Xaa equals any of the naturally occurring L-amino acids
MPGFXWFVFVFVFLSNPA

SEQ ID NO: 5174 - protein, 629 aa, Homo sapiens
MCFIPLVCWIVCTGLKQQMESGKSLAQTSKTTTAVYVFFLSSLLQPRGGSQEHGLCAHLWGLCSLAADGIWNQKILFEESDLRNHGLQKADVSAFLRMNLFQKEVDCEKFYSFIHMTFQEFFAAMYYLLEEEKEGRTNVPGSRLKLPSRDVTVLLENYGKFEKGYLIFVVRFLFGLVNQERTSYLEKKLSCKISQQIRLELLKWIEVKAKAKKLQIQPSQLELFYCLYEMQEEDFVQRAMDYFPKIEINLSTRMDHMVSSFCIENCHRVESLSLGFLHNMPKEEEEEEKEGRHLDMVQCVLPSSSHAACSHGLVNSHLTSSFCRGLFSVLSTSQSLTELDLSDNSLGDPGMRVLCETLQHPGCNIRRLWLGRCGLSHECCFDISLVLSSNQKLVELDLSDNALGDFGIRLLCVGLKHLLCNLKKLWLVSCCLTSACCQDLASVLSTSHSLTRLYVGENALGDSGVAILCEKAKNPQCNLQKLGLVNSGLTSVCCSALSSVLSTNQNLTHLYLRGNTLGDKGIKLLCEGLLHPDCKLQVLELDNCNLTSHCCWDLSTLLTSSQSLRKLSLGNNDLGDLGVMMFCEVLKQQSCLLQNLGLSEMYFNYETKSALETLQEEKPELTVVFEPSW

SEQ ID NO: 5175 - protein, 34 aa, Homo sapiens
MYVCACVFVCAYCVHMCVSRLCVSFWGMCVSVLL

SEQ ID NO: 5176 - protein, 16 aa, Homo sapiens
MTELLLFFSPLYQEVN

SEQ ID NO: 5177 - protein, 2 aa, Homo sapiens
MS

SEQ ID NO: 5178 - protein, 15 aa, Homo sapiens
MSNWWRWGLLLWPPQ

SEQ ID NO: 5179 - protein, 60 aa, Homo sapiens
VITMALAAVVTEVALANLNVVETVAGVTNQMKMIGQNHSHQVNAWNSKFLKCMLLVMKPY

SEQ ID NO: 5180 - protein, 47 aa, Homo sapiens
PTLTAPTLALLLLPKISCLLTSTHPRTQGSRAHFPRAWRTPQTPSSM

SEQ ID NO: 5181 - protein, 27 aa, Homo sapiens
MASTSRWTRWALLLASSSAWPNSTAPS

SEQ ID NO: 5182 - protein, 51 aa, Homo sapiens
MAFLSLFPLSSLFSHFSLFKTCLQSTQNRVDKSLSSPDFSWPRNERLFSKP

SEQ ID NO: 5183 - protein, 30 aa, Homo sapiens
ISMFSLLVKMCVQMTVGRDARCKFTSLPSL

SEQ ID NO: 5184 - protein, 9 aa, Homo sapiens
MGTRLGDFC

SEQ ID NO: 5185 - protein, 31 aa, Homo sapiens
MLCVHFSARESVAFLCLSKGSTVQNSLAPLT

SEQ ID NO: 5186 - protein, 68 aa, Homo sapiens
  SITE (32): Xaa equals any of the naturally occurring L-amino acids
ILATPQPLVVPHAHFAEDEPQVLIRCWNKPPXLSESPTNLEFETHSLARLNGLCSAIKRLLGCYPWQG

SEQ ID NO: 5187 - protein, 75 aa, Homo sapiens
MSALPSPLCPFCSVLLLPSPPARVPGLCLLFLSLPPLTPPSTVGTCKPQGCAPSWSPIHPRNVSCSIYKGHGDFG

SEQ ID NO: 5188 - protein, 41 aa, Homo sapiens
MTYLLFLSELDTLCPGQPCPWAATAHQSWEEAGPGGLGRRQ

SEQ ID NO: 5189 - protein, 12 aa, Homo sapiens
MGSSLAFILFLP

SEQ ID NO: 5190 - protein, 8 aa, Homo sapiens
GLSYFLDH

SEQ ID NO: 5191 - protein, 99 aa, Homo sapiens
MRLGRWGLRMWPWRVLFLAGASPSQLQEMGCRCTSTAQSSAGEGSKTSLHPDPRVCRSFQLLAPWRMGREGERGRWVEDSTGAWPHDGCNAATFSVGHV

SEQ ID NO: 5192 - protein, 19 aa, Homo sapiens
AFINSCIFFPLFLLAYYVY

SEQ ID NO: 5193 - protein, 20 aa, Homo sapiens
DSFIGEWVVALGKVLPYCLF

SEQ ID NO: 5194 - protein, 42 aa, Homo sapiens
  SITE (34): Xaa equals any of the naturally occurring L-amino acids
MKGHYPCAWMSLSWFRTLSAMIYCLLYIDKSSIXFFTNERRI

SEQ ID NO: 5195 - protein, 32 aa, Homo sapiens
MGCELWISAAWISAVWCSNRLHNLVESQSSHL

SEQ ID NO: 5196 - protein, 19 aa, Homo sapiens
DKFLIFSYFCLCLFMPLIP

SEQ ID NO: 5197 - protein, 26 aa, Homo sapiens
MPWYFSPSLLWSLFQWSDSEAGSRLC

SEQ ID NO: 5198 - protein, 35 aa, Homo sapiens
MSLPMSFFILSHLSSFMICTYGKDYSHFTDEGAFT

SEQ ID NO: 5199 - protein, 52 aa, Homo sapiens
MPLAIFALVDLFWVSSFSNINVPKDHLVKCLRFRVLSHPERSGLNRSRNLHF

SEQ ID NO: 5200 - protein, 38 aa, Homo sapiens
MYMQHVLLCLMYISMSFNKFILSCNNHHDQFTERFHLL

SEQ ID NO: 5201 - protein, 20 aa, Homo sapiens
MSWLRIILSMLKTAFEPRSV

SEQ ID NO: 5202 - protein, 55 aa, Homo sapiens
MCTSFMQLWFVLGLADLGWAWLQAICLVHVCSLHLSLFWDQQVTQGMLPSWPWKN

SEQ ID NO: 5203 - protein, 31 aa, Homo sapiens
MLLILFFIQVTGCIREMVWAFKGITEKGISY

SEQ ID NO: 5204 - protein, 6 aa, Homo sapiens
AGAVFG

SEQ ID NO: 5205 - protein, 44 aa, Homo sapiens
MFSLLRAFPSDRCPCPAASTGWQRARASAPKLSCRALRPRVCPQ

SEQ ID NO: 5206 - protein, 34 aa, Homo sapiens
MPSLIFIISFFLLAVDLVCPSFSCSLRCAGNLFL

SEQ ID NO: 5207 - protein, 74 aa, Homo sapiens
MRSSLWSSSSLLSLMANFPAQTSASGLFPSVHTDFFPSPVPSWRVGPSAAALGHSQDKVLVYLGEQITSSSIHT

SEQ ID NO: 5208 - protein, 36 aa, Homo sapiens
  SITE (15): Xaa equals any of the naturally occurring L-amino acids
MCICVFYMIYIYLYXMFTYKVGSQTWKDFPYHTKEI

SEQ ID NO: 5209 - protein, 67 aa, Homo sapiens [sequence omitted]

SEQ ID NO: 5210 - protein, 17 aa, Homo sapiens
ICIWNISYMNMYFFTQQ

SEQ ID NO: 5211 - protein, 42 aa, Homo sapiens
MSPVLHLRRLARCILFHLPQFSSSVKRPHGFGANRMTDKRDK

SEQ ID NO: 5212 - protein, 35 aa, Homo sapiens
MYLLINKLYIFCMFTQTVLVLESPHHLNFVGEFCK

SEQ ID NO: 5213 - protein, 55 aa, Homo sapiens
  SITE (33): Xaa equals any of the naturally occurring L-amino acids
MWLTKKFKLNVRLTFCFYWTAQVEKVSEHKTPXKYIFHWDWGWVLWGKCIGAGQC

SEQ ID NO: 5214 - protein, 92 aa, Homo sapiens
MSDAPLGVWVLLQAVRCSPGCVGTAPDSPMLTCGCGCCSRPSDAHLGVWVLLQVVRCSPWAMGAATCCQMLTSGCGHCSGLSDARLWLWALL

SEQ ID NO: 5215 - protein, 83 aa, Homo sapiens
PLQSSPWRLLFRGHLPVLSGGSVPASAPGSHPCPAHEGAHPWTYLSSPTTSLAFNGSGIRDRGATRQRAPGGLMGGRGKSRHC

SEQ ID NO: 5216 - protein, 38 aa, Homo sapiens
MCVGKDFFWFLLFGFAQILESVGLHLLPNLKSFLSLFL

SEQ ID NO: 5217 - protein, 54 aa, Homo sapiens
MRRCTLEGNRWLLFLCVVWNGWQKVSELCGRQHGAKGTVSPSSPLPLSQTPADI

SEQ ID NO: 5218 - protein, 22 aa, Homo sapiens
TSLILCCLSTYLLSLYCGPCTY

SEQ ID NO: 5219 - protein, 41 aa, Homo sapiens
MDILFFFLFYFLQERLGFSTVSNKSSGVIFFPVVLPQPPES

SEQ ID NO: 5220 - protein, 35 aa, Homo sapiens
MCIAIVHSLSLPYGTPLYEPSIYCIYGCGTNYPKT

SEQ ID NO: 5221 - protein, 71 aa, Homo sapiens
MNWRSCKLGSVYYYRFCTVSPRVLVKQDGGRGTSFPSFTSLRSIFSIFYNFAFGKGLLISWEFRHILKISP

SEQ ID NO: 5222 - protein, 4 aa, Homo sapiens
MVSC

SEQ ID NO: 5223 - protein, 35 aa, Homo sapiens
MPGSCFSWSFSRLLGVFLSLQCSWKTVYGILSREA

SEQ ID NO: 5224 - protein, 31 aa, Homo sapiens
MGHIFWMCALKLILLARRKKGDASVSNILDT

SEQ ID NO: 5225 - protein, 23 aa, Homo sapiens
MLHFYTIKFIFSIVCLLAPIGSR

SEQ ID NO: 5226 - protein, 29 aa, Homo sapiens
MYLIFVYCVVLFFVSALTGVAGGAPSEMH

SEQ ID NO: 5227 - protein, 20 aa, Homo sapiens
MIKLNTSFSIFNAAMLLYLW

SEQ ID NO: 5228 - protein, 35 aa, Homo sapiens
MNNPQSPGLILFTWLSCLFAFRSVLASSLSKRIRA

SEQ ID NO: 5229 - protein, 38 aa, Homo sapiens
MHRRDLSVCVCLCLCPSLSLSLCKTRIHCCRELPQIAP

SEQ ID NO: 5230 - protein, 68 aa, Homo sapiens
  SITE (22): Xaa equals any of the naturally occurring L-amino acids
MWHMMSFTPCSLPCSLALCLPXGPACLPPVPLPLTSNIQLKAKAGLLLRQRLCSIASVHLPALLVSAR

SEQ ID NO: 5231 - protein, 32 aa, Homo sapiens
MYVRLNVTYYLGLFFKLKFALALQPARQGVIT

SEQ ID NO: 5232 - protein, 54 aa, Homo sapiens
MLPNIVLPSWCLVCLVQFSFTFLSPSHSPRIVTTGLYTPGRHEPNLLSCSLLHL

SEQ ID NO: 5233 - protein, 6 aa, Homo sapiens
MRTRLW

SEQ ID NO: 5234 - protein, 9 aa, Homo sapiens
  SITE (6): Xaa equals any of the naturally occurring L-amino acids
MAAIGXNGF

SEQ ID NO: 5235 - protein, 25 aa, Homo sapiens
MALNWLTLLLTWTFESYVVTYFPHL

SEQ ID NO: 5236 - protein, 23 aa, Homo sapiens
  SITE (11): Xaa equals any of the naturally occurring L-amino acids
MCADLPGPVGXADVGPGSYPGIW

SEQ ID NO: 5237 - protein, 64 aa, Homo sapiens
HMHTAVAHTSLSLSLVTVLPCDSHPSDRPCSLAAPSTGRGLAWCPVSVCLHRAGRFHKDWLMSR

SEQ ID NO: 5238 - protein, 5 aa, Homo sapiens
MALPT

SEQ ID NO: 5239 - protein, 32 aa, Homo sapiens
MGSPGALLALLPSLLPFSWGLGPWPLLSSPKT

SEQ ID NO: 5240 - protein, 36 aa, Homo sapiens
MFIWVGVSLCLMFTVAIDARDFRFLSCPNFYLPFDF

SEQ ID NO: 5241 - protein, 18 aa, Homo sapiens
MTIPSLNDFVCRILLLLN

SEQ ID NO: 5242 - protein, 57 aa, Homo sapiens
KSARIRIFLIPLCSTSLPIPKFLPLGRKFLLLLFDLIFNSISMIFCFVFFFLRMTVF

SEQ ID NO: 5243 - protein, 43 aa, Homo sapiens
NCNLLFACIVILVYALFDISCLPYLYLKYSKYLFLYIFGKNIF

SEQ ID NO: 5244 - protein, 56 aa, Homo sapiens
  SITE (16): Xaa equals any of the naturally occurring L-amino acids
  SITE (21): Xaa equals any of the naturally occurring L-amino acids
  SITE (54): Xaa equals any of the naturally occurring L-amino acids
MGRFWAWHIIASLLLXHTIFXRNNSESQEVKENAISTLCRIERHLTNRCGSQIXIF

SEQ ID NO: 5245 - protein, 6 aa, Homo sapiens
WMHTGH

SEQ ID NO: 5246 - protein, 49 aa, Homo sapiens
FFAFLGPFPFTLISLSRGLQFPHNRFDRRKILNWEAHRGKRTAFLRIPV

SEQ ID NO: 5247 - protein, 66 aa, Homo sapiens
MIKIGSQNKQKRKKSRKFLPACSLCMLLCNVILLLAPSRDGSPESELDHVNCFDHWSIHKHGTTEA

SEQ ID NO: 5248 - protein, 30 aa, Homo sapiens
MWCMLDITFLLGLWNFGICQAEGINVTTPQ

SEQ ID NO: 5249 - protein, 67 aa, Homo sapiens
MWRQKTLYFTFLLNVSFSLYFSFSLWYFFTPCPHPHPPTPTLALPNATKIVLIRTPGSPTNRSDTIN

SEQ ID NO: 5250 - protein, 52 aa, Homo sapiens
GATGMWRCRGYWAPGQNAIWWLALKMVLCCSCLGLGEFMRPSMSSLSGAVPL

SEQ ID NO: 5251 - protein, 22 aa, Homo sapiens
MLCSLSLSLLLFANSSTLNPKS

SEQ ID NO: 5252 - protein, 33 aa, Homo sapiens
MPVHSHTPVERLVYLTLFFSLLKKCHLTNSITS

SEQ ID NO: 5253 - protein, 9 aa, Homo sapiens
CCVLKIFGS

SEQ ID NO: 5254 - protein, 159 aa, Homo sapiens
MYTFACVHVCTCVCLCAYLSVCVHICMYMGPVIAARLLPRAFSARWPCLCSFCQPRGAEWPSSQPQWAQWGGPSSEGTRAAASPVFPHAVLRAPVHEPHSQEQSPRHLSHLGHPWPCVRSQSLEGFVHQAWDPGILPQSPPAWGQCGGWRGWRVARVAG

SEQ ID NO: 5255 - protein, 23 aa, Homo sapiens
MRNLEVMHSRSLGICDSHSVRCF

SEQ ID NO: 5256 - protein, 38 aa, Homo sapiens
MTGKMTVMMRIPSSIVTNTAMESEVPGFKTQVYRSLAV

SEQ ID NO: 5257 - protein, 53 aa, Homo sapiens
MRHHVAVLPLGSNVLKLLCLFFERNISREVPKSSLVISFNDAEILVKKLGSLP

SEQ ID NO: 5258 - protein, 21 aa, Homo sapiens
MITAIGIFTCILLSFISPMYI

SEQ ID NO: 5259 - protein, 37 aa, Homo sapiens
MYFPIICFRLFLFTEMIFSKIGTTKKLQMQTYVISLL

SEQ ID NO: 5260 - protein, 160 aa, Homo sapiens
ATRGGWLFRAIPASVEHGRVYVGNVAWMHVLAARELEQRAALMGGQVYFCYDGSPYRSYEDFNMEFLGPCGLRLVGARPLLPYWLLVFLAALNALLQWLLRPLVLYAPLLNPYTLAVANTTFTVSTDKAQRHFGYEPLFSWEDSRTRTILWVQAATGSAQ

SEQ ID NO: 5261 - protein, 14 aa, Homo sapiens
MAWTLLGRVVGHHP

SEQ ID NO: 5262 - protein, 1 aa, Homo sapiens
S

SEQ ID NO: 5263 - protein, 36 aa, Homo sapiens
MLIVYLKFQFNCASVFCLGILLWGTSRSLASSWSMS

SEQ ID NO: 5264 - protein, 12 aa, Homo sapiens
MILALIKMMTFA

SEQ ID NO: 5265 - protein, 41 aa, Homo sapiens
MHLCWAGALSFVFWANLILIYLFGTSESPQNILSSYFELGV

SEQ ID NO: 5266 - protein, 31 aa, Homo sapiens
MKAILCFLLLLMNPFPPFSFPSPIDQKCEGG

SEQ ID NO: 5267 - protein, 187 aa, Homo sapiens
  SITE (140): Xaa equals any of the naturally occurring L-amino acids
  SITE (141): Xaa equals any of the naturally occurring L-amino acids
  SITE (152): Xaa equals any of the naturally occurring L-amino acids
  SITE (175): Xaa equals any of the naturally occurring L-amino acids
  SITE (178): Xaa equals any of the naturally occurring L-amino acids
MHPLPRAWGLVVGSLAFTQGACLSHGGQPKVGRSPLGDWDKMPSFQRNVEASRKKKAVRPEESGVLHQRPVPSGQPLRWALGGCGVPGFHQGCVCLPRGASKRGKKSTGGWGQDVRLSGGHCGSPRKKVTRLKRKLGSSXXGQCLPGSLCAXSRGARTQFALKGADYNLIGRRFXNVXTWKNPWGYP

SEQ ID NO: 5268 - protein, 85 aa, Homo sapiens
MASYCGWIKTKTLAWLIRSAGFGSANLSSLLALSISLLFPSFVTQVSFLKMHHGLFPPPGTFFPPFPLTCQFLLSFISLLKCHCF

SEQ ID NO: 5269 - protein, 19 aa, Homo sapiens
  SITE (8): Xaa equals any of the naturally occurring L-amino acids
MIRQQYNXHFMSVAVSTFS

SEQ ID NO: 5270 - protein, 33 aa, Homo sapiens
MFSLSLILYFVSQIFPQFSWLNHFNCKGKIYIS

SEQ ID NO: 5271 - protein, 91 aa, Homo sapiens [sequence omitted]

SEQ ID NO: 5272 - protein, 148 aa, Homo sapiens
MASVVLALRTRTAVTSLLSPTPATALAVRYASKKSGGSSKNLGGKSSGRRQGIKKMEGHYVHAGNIIATQRHFRWHPGAHVGVGKNKCLYALEEGIVRYTKEVYVPHPRNTEAVDLITRLPKGAVLYKTFVHVVPAKPEGTFKLVAML

SEQ ID NO: 5273 - protein, 53 aa, Homo sapiens
MPARQCHVYTCMCVCTWVCVPVCVCGILVTFAIFSWLEVRGPSHTQRQELMQV

SEQ ID NO: 5274 - protein, 28 aa, Homo sapiens
MCLLNGCVCKIKMLTVATLLLSLPLGLL

SEQ ID NO: 5275 - protein, 31 aa, Homo sapiens
MTIPKDSLILFRLLAFIVYVLWFSTNIHYPQ

SEQ ID NO: 5276 - protein, 30 aa, Homo sapiens
MLCFLIWRLVMWVCSTCKKMHRAQDKCAFP

SEQ ID NO: 5277 - protein, 32 aa, Homo sapiens
MKPRVISTTIFFLLLFKSVCQSFKFFLSDCCH

SEQ ID NO: 5278 - protein, 36 aa, Homo sapiens
MLLMALLVTLLTSIQVGLPDAILSHPEITAVYIDLV

SEQ ID NO: 5279 - protein, 34 aa, Homo sapiens
MREGQLKAKRKPCMGRLCFWSYFFFFFFFTIHGI

SEQ ID NO: 5280 - protein, 30 aa, Homo sapiens
MLFPLFFILSIFSVHIVNSTLEMEKQSQRV

SEQ ID NO: 5281 - protein, 62 aa, Homo sapiens
MLQTHPLLSQLPAPGPRLVVSLAFLLYCIARYCPTCTMLRSLSTTCDSATGLIRVLRCVLPS

SEQ ID NO: 5282 - protein, 37 aa, Homo sapiens
ILGFPGCWGGSLALPVGLRLVGGGGGGSRCHGSRRPN

SEQ ID NO: 5283 - protein, 55 aa, Homo sapiens
MCVCVQACVHMCLCVHVCASVHVCECAYVHCVRECACGPCTHLSIHVSLHAHVSM

SEQ ID NO: 5284 - protein, 27 aa, Homo sapiens
MGRCTFVCRIEIFFSPYLIPPEFGDYL

SEQ ID NO: 5285 - protein, 132 aa, Homo sapiens [sequence omitted]

SEQ ID NO: 5286 - protein, 51 aa, Homo sapiens
IISLTPLWCLPSAIACSHILSFGFPPEIPNFPTRSYKAIQFSSASIRKLSF

SEQ ID NO: 5287 - protein, 17 aa, Homo sapiens
MLMPWGLGLGIWLCSLT

SEQ ID NO: 5288 - protein, 54 aa, Homo sapiens
  SITE (31): Xaa equals any of the naturally occurring L-amino acids
  SITE (40): Xaa equals any of the naturally occurring L-amino acids
  SITE (48): Xaa equals any of the naturally occurring L-amino acids
MCARKCRMLLVLQTVVCGTPKPLSFHDAFCXVITFPWRRXQPWWRALXWLCPSA

SEQ ID NO: 5289 - protein, 34 aa, Homo sapiens
MIVINKIKTIYLFLVMLQFTRKIQKILKKKICWN

SEQ ID NO: 5290 - protein, 34 aa, Homo sapiens
MLMNQVLTAPIGLVLLLLFALLTFPPSSSIRERN

SEQ ID NO: 5291 - protein, 27 aa, Homo sapiens
MTSYCPAGSVPRLSLPSTVRPLLGWLY

SEQ ID NO: 5292 - protein, 41 aa, Homo sapiens
MHWQIQLINWSSFLSLFSFLQISAQSPKYCLSGPIMCPCIL

SEQ ID NO: 5293 - protein, 1 aa, Homo sapiens
M

SEQ ID NO: 5294 - protein, 7 aa, Homo sapiens
MPLASAF

SEQ ID NO: 5295 - protein, 37 aa, Homo sapiens
MLFGSLCDLHSAFFLISSTACPTLSFLHSTPDVFQNL

SEQ ID NO: 5296 - protein, 5 aa, Homo sapiens
WLLKT

SEQ ID NO: 5297 - protein, 12 aa, Homo sapiens
MILFTMFILAGW

SEQ ID NO: 5298 - protein, 30 aa, Homo sapiens
  SITE (2): Xaa equals any of the naturally occurring L-amino acids
MXHGLLLISLQLLGPIITYTTISDPTTFLL

SEQ ID NO: 5299 - protein, 36 aa, Homo sapiens
LPSLLLFLNPFIFTILLLFPCGGFNTSIFFLNQLDS

SEQ ID NO: 5300 - protein, 4 aa, Homo sapiens
MLPL

SEQ ID NO: 5301 - protein, 37 aa, Homo sapiens
MGLLVPLTLLLQLSAGELSVVLQDSTDCMSELGLAWL

SEQ ID NO: 5302 - protein, 44 aa, Homo sapiens
TLLGPLEMFGRVWRRGTKVCTTRCLQSDWVSPSFKEAISVYPQN

SEQ ID NO: 5303 - protein, 152 aa, Homo sapiens
ISEHGLKPTTKAVPASDSSPSKPSSSSFLIPSFSSLALVEHFAQHGAWLIIKLPERTHIIITSSMKASTTSQAKLLCVSTQCSHILFCLWLAPFKENLFTYPSSTTLHSQHTNTVSHQQPSLSLCLHAVESKKELVGLIHLSPRAHKGATEN

SEQ ID NO: 5304 - protein, 2 aa, Homo sapiens
FT

SEQ ID NO: 5305 - protein, 47 aa, Homo sapiens [sequence omitted]

SEQ ID NO: 5306 - protein, 75 aa, Homo sapiens
MSLRPVTQTTFGDCGSVSSHRGKKPMNKQAQPLPPRSDDFMPQTANPHLPTDASVTAGEKPRNRGPDVETEPFRA

SEQ ID NO: 5307 - protein, 22 aa, Homo sapiens
GITFFFIYFGFCFSHEGLFSNI

SEQ ID NO: 5308 - protein, 50 aa, Homo sapiens
LLVDFDSDKRTQPIWVFFALIVWGFEVLARSWRGVCVQVCECMCNVCVQV

SEQ ID NO: 5309 - protein, 30 aa, Homo sapiens
MISDPLLLPLTFFLFISLSINFPVVEAQRW

SEQ ID NO: 5310 - protein, 12 aa, Homo sapiens
MPFTFFLFVNLL

SEQ ID NO: 5311 - protein, 39 aa, Homo sapiens
MSEAGWWAWLFVILHPFGMPDTFHNNFKKDKTTAEKCIE

SEQ ID NO: 5312 - protein, 38 aa, Homo sapiens
MFIALCSKVCVCVNAYVCVHTYVVFMPGMYTIWVHICN

SEQ ID NO: 5313 - protein, 31 aa, Homo sapiens
MRSLGLRCAFYLLCLLNPSALPDPAGRSPPL

SEQ ID NO: 5314 - protein, 30 aa, Homo sapiens
MLAGYFADLFMWLPHSVTCLCTSVCFCCGW

SEQ ID NO: 5315 - protein, 14 aa, Homo sapiens
MVIRLSNWAPTCVS

SEQ ID NO: 5316 - protein, 104 aa, Homo sapiens
MAPLPSSLLLLLTIYHGSSHLPSTMIVSFLRPHQEQVPAPCFLHSCSLLFFRMATANIVQMSKLPTPLCAPPTLNLLTLCSRCKLTCPFCHRGCLSPPSAVTLL

SEQ ID NO: 5317 - protein, 9 aa, Homo sapiens
QAQLIFSWG

SEQ ID NO: 5318 - protein, 30 aa, Homo sapiens
MGVLAVLLPVTGTWAWVRGGHVAPDTALRI

SEQ ID NO: 5319 - protein, 59 aa, Homo sapiens [sequence omitted]

SEQ ID NO: 5320 - protein, 32 aa, Homo sapiens
MGAGAFGYLALPCLVCLTYLLPTLSRNHSQMG

SEQ ID NO: 5321 - protein, 34 aa, Homo sapiens
MALEAGALYIGWILGQAFFFFFFSEVSLPKCGKV

SEQ ID NO: 5322 - protein, 15 aa, Homo sapiens
MHRSLSPCKIWLLFF

SEQ ID NO: 5323 - protein, 33 aa, Homo sapiens
MSLPHLLFSAFMSQAAWGLLFLGLLHSTNLRWA

SEQ ID NO: 5324 - protein, 50 aa, Homo sapiens
MWSLLHFCLLLASFLSCFELLASVCSLGRRFEEYSWFFPGSRGSGCAGVS

SEQ ID NO: 5325 - protein, 22 aa, Homo sapiens
MASLLMFLVPLNRIGRIPHLCR

SEQ ID NO: 5326 - protein, 1 aa, Homo sapiens
M

SEQ ID NO: 5327 - protein, 16 aa, Homo sapiens
SWCDGGCWCRLMYSFV

SEQ ID NO: 5328 - protein, 20 aa, Homo sapiens
MGSLLVFPRSSYALLHLIGV

SEQ ID NO: 5329 - protein, 34 aa, Homo sapiens
MIMPLCVVCIVLNPVLCIEEILQSIVLHKYWGLA

SEQ ID NO: 5330 - protein, 50 aa, Homo sapiens
MVTAVCQPVLTAPVFALLLPAVARSPSVGAALEPGKRNRRVKRGCGVPFM

SEQ ID NO: 5331 - protein, 34 aa, Homo sapiens
MDSTSDTPFPRWSLRLRSLVLVLIQGLSPVLSRV

SEQ ID NO: 5332 - protein, 39 aa, Homo sapiens
MFILLIMYLIWEGKAVSCYLLPPIKASVATVLTFNPWKF

SEQ ID NO: 5333 - protein, 181 aa, Homo sapiens
MNRRVCVLMLLVAWIGGFLHSLVQFLFIYQLPFCGPNVIDNFLCDLYPLLKLACTNTYVTGLSMIANGGAICTVTFFPLLLSYGVILPSLKTQSLEGKCKAFYTCASHITVITLFFVPCIFLFARPNSTFPIDKSMTVVLTCITPMLKPLIYALRNAEMKSAMRKLWSEKVSLAGKGLYPS

SEQ ID NO: 5334 - protein, 31 aa, Homo sapiens
MGWGLLCTFLYLAPQKTEGAAADLASTSPAP

SEQ ID NO: 5335 - protein, 30 aa, Homo sapiens
MLNLCITLLFLSVTLTNIHSNHSSYSNYLL

SEQ ID NO: 5336 - protein, 39 aa, Homo sapiens
MHPLLFYLVKLFLEARDTTCIIMSCPTPGIQEALKITCS

SEQ ID NO: 5337 - protein, 26 aa, Homo sapiens
MATMFTKITTSIVFGLSLALPISTRA

SEQ ID NO: 5338 - protein, 78 aa, Homo sapiens
MDSDFPTTKIMMLLASIPALLQGVVNILYRHRLGLSNFLPQCSLNSLKGSNVGPNLHTEKLRQKKSKQFVPCHQITYK

SEQ ID NO: 5339 - protein, 6 aa, Homo sapiens
MFIFFF

SEQ ID NO: 5340 - protein, 39 aa, Homo sapiens
MKSLLLAIAFQKLLGSPHPILQPHLFASLHPSPLIVQGS

SEQ ID NO: 5341 - protein, 32 aa, Homo sapiens
  SITE (6): Xaa equals any of the naturally occurring L-amino acids
PPPAVXSLPPLLLPSLLPPQGSGAASPSPTPW

SEQ ID NO: 5342 - protein, 28 aa, Homo sapiens
MSPNCHLLETRPSASLLLLGIPLLRGAS

SEQ ID NO: 5343 - protein, 33 aa, Homo sapiens
MLNVFAVPVYVLLIIFWERRAKKYTAENRQFML

SEQ ID NO: 5344 - protein, 38 aa, Homo sapiens
MNLKILTCFLVSYTFPSSRSAEPIMLKIIIIKKSGWRS

SEQ ID NO: 5345 - protein, 39 aa, Homo sapiens; identical to SEQ ID NO: 5311

SEQ ID NO: 5346 - protein, 62 aa, Homo sapiens
MFLQVSYLWTDVSAGQLLMWLCRWPTTVAGYFSQGTCLLEMYPLSSPFSSFCQRIAGVVEES

SEQ ID NO: 5347 - protein, 33 aa, Homo sapiens
MTAYLLVLQALTRLTAQTHHTGEHERVNESFII

SEQ ID NO: 5348 - protein, 29 aa, Homo sapiens
MPRPGSHLSWWRLWLAPRPPALLLRDSRT

SEQ ID NO: 5349 - protein, 9 aa, Homo sapiens
MVIIIVFNQ

SEQ ID NO: 5350 - protein, 37 aa, Homo sapiens
MCCYEALASWVMHFLVFALPRSLSHVSFSLGFYPTLK

SEQ ID NO: 5351 - protein, 13 aa, Homo sapiens
MLIFYILLCMVKG

SEQ ID NO: 5352 - protein, 17 aa, Homo sapiens
LFCPLLVIFQNFCSGDN

SEQ ID NO: 5353 - protein, 10 aa, Homo sapiens
MGVGLLNRII

SEQ ID NO: 5354 - protein, 66 aa, Homo sapiens
  SITE (36): Xaa equals any of the naturally occurring L-amino acids
  SITE (58): Xaa equals any of the naturally occurring L-amino acids
  SITE (63): Xaa equals any of the naturally occurring L-amino acids
MQLSSAVIAFSCCPVFMWSLVNSTRILSLLAKVLPXAERESPSKLTSVTPPSLTPHLXRATNXLFD

SEQ ID NO: 5355 - protein, 62 aa, Homo sapiens
MSGSQVVALFLLCVRISKVISVYCLESGLFCFTPTFTEKNFFSQATKHLVSGVKEDFIILEL

SEQ ID NO: 5356 - protein, 39 aa, Homo sapiens
MLAVFCFLSPNSLLFFIFWSRVYRFPPNRRSRPGIFLRG

SEQ ID NO: 5357 - protein, 34 aa, Homo sapiens
MLIIMAQLLQWFSCWSFLPLAALNCEWYRVTELT

SEQ ID NO: 5358 - protein, 63 aa, Homo sapiens
MRLPLRHSASLEASVSRVLHTPSGRDGPGTPCNPSGQMCHCPMKIKGHHSSSRRQNLNSNLSQ

SEQ ID NO: 5359 - protein, 36 aa, Homo sapiens
MLSCLRHWTWNLLVLRPLASMVTPAPHLVRRPSVSD

SEQ ID NO: 5360 - protein, 55 aa, Homo sapiens
MRENFTAKVWLAIPFLALGFLCVSEPRYTDFRSKESSSLPLGKTGRGMVLYQSHT

SEQ ID NO: 5361 - protein, 33 aa, Homo sapiens
MRVWRLAWFAWAWVGHGTSCTGVQSTLHIVTPS

SEQ ID NO: 5362 - protein, 46 aa, Homo sapiens
MKISFTFFILLLKNVLAARKFKMIDVAHIMFLCDRLLWIKSRQTMA

SEQ ID NO: 5363 - protein, 31 aa, Homo sapiens
MRLRDRRAGEGQRQLLLLRLLLRTSFWGVVF

SEQ ID NO: 5364 - protein, 66 aa, Homo sapiens
MLGVSASGSLQLLQSQRGLERGPAPRQPADTSSSMCESLVFTPTAPFSGGHCPKARHGRLTSPFYG

SEQ ID NO: 5365 - protein, 47 aa, Homo sapiens
MCGRQPMRLWVSFAVHCTRPVKAAPRNPTLLLCRLPWPESCHPTCRQ

SEQ ID NO: 5366 - protein, 49 aa, Homo sapiens
MTWPFFYSTFRVWALAPSVSALLTQCVKMKTEPSFPSSSVPQTFSPTQL

SEQ ID NO: 5367 - protein, 358 aa, Homo sapiens
MGSAYAIITALLTKFTKLCEFPMLETGLFFLLSWSAFLSAEAAGLTGIVAVLFCGVTQAHYTYNNLSSDSKIRTKQLFEFMNFLAENVIFCYMGLALFTFQNHIFNALFILGAFLAIFVARACNIYPLSFLLNLGRKQKIPWNFQHMMMFSGLRGAIAFALAIRNTESQPKQMMFTTTLLLVFFTVWVFGGGTTPMLTWLQIRVGVDLDENLKEDPSSQHQEANNLDKNMTKAESARLFRMWYSFDHKYLKPILTHSGPPLTTTLPEWCGPISRLLTSPQAYGEQLKEDDVECIVNQDELAINYQEQASSPCSPPARLGLDQKASPQTPGKENIYEGDLGLGGYELKLEQTLGQSQLN

SEQ ID NO: 5368 - protein, 37 aa, Homo sapiens; identical to SEQ ID NO: 4962

SEQ ID NO: 5369 - protein, 97 aa, Homo sapiens
MSISRLKIAKRFLQDIPQDQFLYIHLVLGGTSMGFHVLWLLVEFTQWRTLARGRKRGGSSLTGLNFTFCSPWMRAVIITIPGNSQRKRKGKRFGQDS

SEQ ID NO: 5370 - protein, 91 aa, Homo sapiens
MGTWIEMSSLWPCTWCTEPWRRSPCPPPCPRPSSHPPRERRLCSLAPSPSCLPAPHQKTASAPRRPTAASAASTAQGACPPSTASSKHSQQ

SEQ ID NO: 5371 - protein, 38 aa, Homo sapiens; identical to SEQ ID NO: 3312

SEQ ID NO: 5372 - protein, 58 aa, Homo sapiens
MRLPIRTQNYLQTCLGLGLASFLSSSGGVWQHSFFILILPGCGQHWSSVSPDGPPLCP

SEQ ID NO: 5373 - protein, 16 aa, Homo sapiens
MGDPPRASLDNALLAP

SEQ ID NO: 5374 - protein, 37 aa, Homo sapiens
MCVSFLKRIKALIWFFSFKKLLKAAQIGNTKKYGHES

SEQ ID NO: 5375 - protein, 80 aa, Homo sapiens
MNYYFFFKVTTLDFAIFQVLLVICQKAIMLITQSTLPPDGIGPQNSYLGELPSQNRMTFPHLLILLSFALSSSMENKNFS

SEQ ID NO: 5376 - protein, 26 aa, Homo sapiens
  SITE (16): Xaa equals any of the naturally occurring L-amino acids
MRSQDLTGFAVCWGQXIILLILDSQP

SEQ ID NO: 5377 - protein, 29 aa, Homo sapiens
MSGVPLRTGGWPAGLRGVSFHAGLPAAGQ

SEQ ID NO: 5378 - protein, 71 aa, Homo sapiens
MTEERGVWAVLLLRSLAPSLSCLTVCCSSWLLWCPLNSCVTCPGLSLSLLRQGAAGCFLTCTGMPQSTWPG

SEQ ID NO: 5379 - protein, 37 aa, Homo sapiens
MFYLMWWQFIQGVMFSQHLDTQGNFLFWGDSAPSGWR

SEQ ID NO: 5380 - protein, 67 aa, Homo sapiens
EQVEESLQDEDDNDVYILTKVSDILHSIFSSYKEKVLPWFEQLLPLIVNLICPHRPWARQTMGVMHL

SEQ ID NO: 5381 - protein, 30 aa, Homo sapiens
MHPHFFCLKIFTKVILLQVFYTGFICGQCR

SEQ ID NO: 5382 - protein, 124 aa, Homo sapiens
MHPAAFPLPVVVAAVLWGAAPTRGLIRATSDHNASMDFADLPALFGATLSQEGLQGFLVEAHPDNACSPIAPPPPAPVNGSVFIALLRRFDCNFDLKVLNAQKAGYGAAVVHNVNSNELLNMVL

SEQ ID NO: 5383 - protein, 6 aa, Homo sapiens
FTTGDF

SEQ ID NO: 5384 - protein, 33 aa, Homo sapiens
  SITE (13): Xaa equals any of the naturally occurring L-amino acids
  SITE (16): Xaa equals any of the naturally occurring L-amino acids
  SITE (30): Xaa equals any of the naturally occurring L-amino acids
SLGGWGGGQEGKXGGXKLGDSLRDFCFKPXVFL

SEQ ID NO: 5385 - protein, 15 aa, Homo sapiens
MPWWSRWVLWESCAS

SEQ ID NO: 5386 - protein, 42 aa, Homo sapiens
MCSLVVALYLIPPFHTDQLLPGSSPLLSVVKSVTNFWRSFNL

SEQ ID NO: 5387 - protein, 34 aa, Homo sapiens
MNIECFLILFLFSHQIVICHSSPLLFVLHFLLIV

SEQ ID NO: 5388 - protein, 92 aa, Homo sapiens [sequence omitted]

SEQ ID NO: 5389 - protein, 3 aa, Homo sapiens
MSI

SEQ ID NO: 5390 - protein, 13 aa, Homo sapiens
MKQKKIILLFNMA

SEQ ID NO: 5391 - protein, 33 aa, Homo sapiens
CVLSQFFHFPACFLMSAFGPIIVSQHHQHVDKK

SEQ ID NO: 5392 - protein, 14 aa, Homo sapiens
MEAIFTFTVLNGKI

SEQ ID NO: 5393 - protein, 5 aa, Homo sapiens
MWLAC

SEQ ID NO: 5394 - protein, 11 aa, Homo sapiens
MHVLPPHFCSA

SEQ ID NO: 5395 - protein, 10 aa, Homo sapiens
DRYFVLIQMQ

SEQ ID NO: 5396 - protein, 36 aa, Homo sapiens
MCHPLTGESGGVVGVNVLKIYVSCILFESAVFSQQL

SEQ ID NO: 5397 - protein, 47 aa, Homo sapiens
MFWMSLWVSFIIMLHNLYTGYHFRVLKGDTSYKEKDACFHFLKKKKK

SEQ ID NO: 5398 - protein, 33 aa, Homo sapiens
MCFCLKSINIWFHLHSNTWIGFILFLLAFWIQN

SEQ ID NO: 5399 - protein, 57 aa, Homo sapiens
MDSSAAVLGVLLKTLLLLWSCLLFPSQLVKPPSGATVFCNLQWAWRERASPALHACS

SEQ ID NO: 5400 - protein, 17 aa, Homo sapiens
MSYILDTFSLLLFLLYF

SEQ ID NO: 5401 - protein, 39 aa, Homo sapiens
EGLGASWLWHLTSWASTSCSQDPCGDERGAWKGLRPSTA

SEQ ID NO: 5402 - protein, 35 aa, Homo sapiens
MAQVLSWCAKETWLLLGIALRSSLSCPQPNWWAPC

SEQ ID NO: 5403 - protein, 28 aa, Homo sapiens
GNPKKLWRRMVLLLTRQTYLPLALLCGK

SEQ ID NO: 5404 - protein, 19 aa, Homo sapiens
MVTVVQTLLLLTQNRSGAM

SEQ ID NO: 5405 - protein, 72 aa, Homo sapiens
MPLGRLLPRLLFFLIVTYRLGVLGTESSQLLQYEETVHLFCHLDLFATHLLYFLYWKIFLLVLSYEFLFCFN

SEQ ID NO: 5406 - protein, 26 aa, Homo sapiens
LWWLYIVSVAIIQLCCSSANADIDNM

SEQ ID NO: 5407 - protein, 24 aa, Homo sapiens
VMEVLMTMVAIIITAMGMMALMTE

SEQ ID NO: 5408 - protein, 44 aa, Homo sapiens
MSCRCSGFLRRHLHSFLAFFAGEGFGPLSLREHRQRKPGRSRLQ

SEQ ID NO: 5409 - protein, 23 aa, Homo sapiens
MESGHCRLGKWSSLWWCCSCGLL

SEQ ID NO: 5410 - protein, 37 aa, Homo sapiens [sequence omitted]

SEQ ID NO: 5411 - protein, 33 aa, Homo sapiens
  SITE (3): Xaa equals any of the naturally occurring L-amino acids
  SITE (5): Xaa equals any of the naturally occurring L-amino acids
  SITE (10): Xaa equals any of the naturally occurring L-amino acids
MSXSXGTSVXFLRTRFSLCICGRNTPEVMLCYS

SEQ ID NO: 5412 - protein, 30 aa, Homo sapiens
MFWCEFTASFLLFLNAISGLHINSITHPWE

SEQ ID NO: 5413 - protein, 17 aa, Homo sapiens
MSSLLLIIILALSLAYE

SEQ ID NO: 5414 - protein, 6 aa, Homo sapiens
LPGPCL

SEQ ID NO: 5415 - protein, 66 aa, Homo sapiens
MTLVGKTRLSRPGQGAFGCFCCPWLCSALWEAPGRPNVQDHRGESELDRKRTTACVGPLPTIKIAP

SEQ ID NO: 5416 - protein, 180 aa, Homo sapiens
MCYGRCARCIGHSLVWLAILCIVANILLYFPNGETKYASENHLSRFVWFFSGIVGGGLLVFLPAFVFIGLEKDDCCGCCGHEDCGKRCAMFSSVLPAAIGVAGSGYCVSWQPWAWRKDHYVLILRASGTTPLPTPMDSTFWIPPHGPSALNPHMLLNGISLCFLSFWPSVELNSSCVSFK

SEQ ID NO: 5417 - protein, 41 aa, Homo sapiens
MCLIQGMYLITHFCTCTLVWFCNLQFSNQSFIVTFSLPVSL

SEQ ID NO: 5418 - protein, 34 aa, Homo sapiens
MSGLCESRREVFQIMHMDVELLRLLELWMAVLFR

SEQ ID NO: 5419 - protein, 152 aa, Homo sapiens
MEFLGPCGLRLVESRLLVPYWLLVLLAALNALLQWLLRPLFLYAPLLNPYTLAVASTTFTVSTDKAHATSATYPCSLGRTAGPAPSAGCRPWRAQPGDVELGPGARCVARPSIQVQGPLALGAEGLVLHQLACLAAPRASKPRAASLHPHAS

SEQ ID NO: 5420 - protein, 67 aa, Homo sapiens
MTFLITIFRQYLQWSCAPLLLPVLPQKGTSSGDSTQNLFILSEESIIGICVYPDVESYLKCTREIPI

SEQ ID NO: 5421 - protein, 46 aa, Homo sapiens
MKGHQSVFWDFFFFFVFGGREKETRQKRNCRMRKERGEKSSRRNLK

SEQ ID NO: 5422 - protein, 29 aa, Homo sapiens
  SITE (17): Xaa equals any of the naturally occurring L-amino acids
MMNTLSGSGGCWSHCAXHHWHCHPHEWQV

SEQ ID NO: 5423 - protein, 51 aa, Homo sapiens
  SITE (7): Xaa equals any of the naturally occurring L-amino acids
  SITE (9): Xaa equals any of the naturally occurring L-amino acids
  SITE (13): Xaa equals any of the naturally occurring L-amino acids
MIIYYCXLXSSSXFYATVKLMNRVVFGNGNTFVTDLYTVYSIGKMGGGFLI

SEQ ID NO: 5424 - protein, 114 aa, Homo sapiens
LGRLLLRGPRCLLSPATPTLVPPVRGMKKGFRAAFRFQKELERWRLLRCPPPPVRRSEKPNWDYHAEIQAFGHRLQETFSLDLLKTAFVNTCYIKSEEANAKPWNRERSCSSES

SEQ ID NO: 5425 - protein, 37 aa, Homo sapiens
MPLRSFQQVILIAVGVFLSLAALAGGCYFLVLRYKGW

SEQ ID NO: 5426 - protein, 37 aa, Homo sapiens
MGLSAQQGACFLLSLCLPLCLLVISLCQINKFFKNKN

SEQ ID NO: 5427 - protein, 206 aa, Homo sapiens
MTAGWLVIAVGLVRAYLAKGSYHSLYYSIEKPLKFFQTGALLEILHCAIGIVPSSVVLTSFQVMSRVFLIWAVTHSVKEVQSEDSVLLFVIAWTITEIIRYSFYTFSLLNHLPYLIKWARYTLFIVLYPMGVSGELLTIYAALPFVRQAGLYSISLPNKYNFSFDYYAFLILIMISYIPIFPQLYFHMIHQRRKILSHTEEHKKFE

SEQ ID NO: 5428 - protein, 35 aa, Homo sapiens
MSGTTSGLQLCLVIMMNCVCVTLKDSVCQVKKNDV

SEQ ID NO: 5429 - protein, 25 aa, Homo sapiens
MELSRLWHVGFVFLFSFDYVRAISL

SEQ ID NO: 5430 - protein, 37 aa, Homo sapiens
MFCVSLCVCVCVCVRVLTWCSDAQHHNRPPFSSTVGE

SEQ ID NO: 5431 - protein, 26 aa, Homo sapiens
MLPECLLCCVVVGMLLHLSVPQFPQL

SEQ ID NO: 5432 - protein, 211 aa, Homo sapiens
MANSGLQLLGFSMALLGWVGLVACTAIPQWQMSSYAGDNIITAQAMYKGLWMDCVTQSTGMMSCKMYDSVLALSAALQATRALMVVSLVLGFLAMFVATMGMKCTRCGGDDKVKKARIAMGGGIIFIVAGLAALVACSWYGHQIVTDFYNPLIPTNIKYEFGPAIFIGWAGSALVILGGALLSCSCPGNESKAGYRAPRSYPKSNSSKEYV

SEQ ID NO: 5433 - protein, 19 aa, Homo sapiens
MSFTAHSGWWVSLLFWVLD

SEQ ID NO: 5434 - protein, 63 aa, Homo sapiens [sequence omitted]

SEQ ID NO: 5435 - protein, 27 aa, Homo sapiens
GPGQRPPGDAAAVQSRPRPGDAGGAGE

SEQ ID NO: 5436 - protein, 216 aa, Homo sapiens
MRLSALLALASKVTLPPHYRYGMSPPGSVADKRKNPPWIRRRPVVVEPISDEDWYLFCGDTVEILEGKDAGKQGKVVQVIRQRNWVVVGGLNTHYRYIGKTMDYRGTMIPSEAPLLHRQVKLVDPMDRKPTEIEWRFTEAGERVRVSTRSGRIIPKPEFPRADGIVPETWIDGPKDTSVEDALERTYVPCLKTLQEEVMEAMGIKETRKYKKVYWY

SEQ ID NO: 5437 - protein, 14 aa, Homo sapiens
MCAAFLSFGLIHLI

SEQ ID NO: 5438 - protein, 51 aa, Homo sapiens
MRLGPNRMRGRVLHAWLPLLLLLLLLQCTHHSSQLLLLLLAYSLRNLSLVL

SEQ ID NO: 5439 - protein, 21 aa, Homo sapiens
MKPKFPAFAGFPIYFFVDFAS

SEQ ID NO: 5440 - protein, 52 aa, Homo sapiens
MCACVCMHVCACAHVCVRRGCFPMAQSLWGSPKLQGQPWGAPSLESEDHSCL

SEQ ID NO: 5441 - protein, 38 aa, Homo sapiens
MFSKKLFYIQSSLFSLLYFYFVEAFSPQIIYYIIFGLI

SEQ ID NO: 5442 - protein, 23 aa, Homo sapiens
MSLGPSPMCILWLLDPLQKSNTK

SEQ ID NO: 5443 - protein, 33 aa, Homo sapiens
MFLAMLAIISCAVCFSCAEAKTYWAYVPKPPAV

SEQ ID NO: 5444 - protein, 31 aa, Homo sapiens
MALFRIFLVAWFVAFLSVRKLNPILRALEEL

SEQ ID NO: 5445 - protein, 43 aa, Homo sapiens
SCHLMSGMYPPTPSLQATRNTATHNLMSPGEHHCLVSSGIPRH

SEQ ID NO: 5446 - protein, 76 aa, Homo sapiens [sequence omitted]

SEQ ID NO: 5447 - protein, 44 aa, Homo sapiens
MTSACLAWTAVSLPPAVTHRAPLCLPPVPCRLVRRPGCAASDLP

SEQ ID NO: 5448 - protein, 64 aa, Homo sapiens
PCFGPVLEWLAAGPGCPPSARGRRLWHRSPASEATPRLLPTVGAPRGPALRGAAAKKPQSGGAG

SEQ ID NO: 5449 - protein, 59 aa, Homo sapiens
MLTQPLLLSLLLYCACRLVLLPVSLKTQPEVGWLCVHNFNFTCGAESLCCISLCKSTIC

SEQ ID NO: 5450 - protein, 50 aa, Homo sapiens [sequence omitted]

SEQ ID NO: 5451 - protein, 66 aa, Homo sapiens
FLLKHGHPPLMATAEPLGKEPFGIQNSQVAAQCGIWSMTTKAFSQHLLKESGVFYTLLMGTVHEHI

SEQ ID NO: 5452 - protein, 67 aa, Homo sapiens
MSSVTVEIFVWSACCISSTSFHPFLAFIRLKFIIIWMSFRIGTVGVRSYCHLLTKDFAGGIMCGCYL

SEQ ID NO: 5453 - protein, 85 aa, Homo sapiens
MEKLVLVLANLFGRKYIPAKFQNANLSFSQSKVILAELPEDFKAALYEYNLAVMKDFASFLLIASKSVNMKKEHQLPLVKNQIHR

SEQ ID NO: 5454 - protein, 15 aa, Homo sapiens
MKLEVAPVFCWSCCA

SEQ ID NO: 5455 - protein, 8 aa, Homo sapiens
YPAFIGNF

SEQ ID NO: 5456 - protein, 26 aa, Homo sapiens
MIRYLLMCPLYIQLLFLTLLFVLSLP

SEQ ID NO: 5457 - protein, 42 aa, Homo sapiens
ITGVSHRTWPSVVFLIIWKKIKKKKKKKKKKKKKKKKKKKKK

SEQ ID NO: 5458 - protein, 23 aa, Homo sapiens
LVHMAYVTFGKSLAFSESRFPRL

SEQ ID NO: 5459 - protein, 12 aa, Homo sapiens
YLVFLFQYSNIL

SEQ ID NO: 5460 - protein, 32 aa, Homo sapiens
MYSAFHNCLCLALHVLTFLYDVGSSVNLQRKI

SEQ ID NO: 5461 - protein, 14 aa, Homo sapiens
MLLMFFTFWTRERL

SEQ ID NO: 5462 - protein, 70 aa, Homo sapiens
MVQKWRLLLNLLTLPHRSKLLFKMCLTPYFVFRVLDSYLKLGSFGSCLIFCSALRLSLPSTYSGFVCQFF

SEQ ID NO: 5463 - protein, 53 aa, Homo sapiens
MELTIGTFRIMMINWLVFSQHCQLFLRSLLLPLLLCTHHVCMECARRGRGSGR

SEQ ID NO: 5464 - protein, 18 aa, Homo sapiens
  SITE (9): Xaa equals any of the naturally occurring L-amino acids
MILLLLRLXCILKQLAFF

SEQ ID NO: 5465 - protein, 61 aa, Homo sapiens
MLCAMLACGGLCNALTCMEEARLRAEMWPEPSLYRSFNLELSRCHFLPLCLLVVSDIYSKQ

SEQ ID NO: 5466 - protein, 28 aa, Homo sapiens
MLLDAPAIIFLLVAFPNYFHKNYFSYYM

SEQ ID NO: 5467 - protein, 26 aa, Homo sapiens
MAYFYLLGVLQVLPSLHHYMSSEVLF

SEQ ID NO: 5468 - protein, 12 aa, Homo sapiens
MLCLFLLASITI

SEQ ID NO: 5469 - protein, 37 aa, Homo sapiens
MKILLLCLCLILLRVRSCRRKAARAALGMEAADAVTD

SEQ ID NO: 5470 - protein, 28 aa, Homo sapiens
MILMMVIRFLLVPLLIPTTDLHATANSS

SEQ ID NO: 5471 - protein, 16 aa, Homo sapiens
MYFFCFCGFACSGYFL

SEQ ID NO: 5472 - protein, 32 aa, Homo sapiens
MRSCRLARGQLELCWLLIIILKGSEICDGIRF

SEQ ID NO: 5473 - protein, 29 aa, Homo sapiens
MHMEYLLVLLNLTSHPECIDRKSMSYLKL

SEQ ID NO: 5474 - protein, 32 aa, Homo sapiens
MHLIWLCVTGLFISATEIHAVCTYNRYIVSAY

SEQ ID NO: 5475 - protein, 91 aa, Homo sapiens
MVQTALAWWPSSHQPTSGNVSVYCWPYSVTNPAAPCISWLPTPTSPWTSPVEPGSDPDSVPAFQEKLSHFLQASHRSLPRMWAACSSNSTS

SEQ ID NO: 5476 - protein, 40 aa, Homo sapiens
MFVTGKIVTWVNFISSNSFLVLILSMLPKSSLISMNHCFM

SEQ ID NO: 5477 - protein, 44 aa, Homo sapiens
MFLTVFLFVILFMYAFIFVITFFFTLDLLLSFLSPSFLGGRQGH

SEQ ID NO: 5478 - protein, 21 aa, Homo sapiens
MNVRYWDRDPNLKQQPVPVVT

SEQ ID NO: 5479 - protein, 46 aa, Homo sapiens
NLFVSVYDSFFSLVQSSASPALSSTLQSPFRESISRNETRQSCSAP

SEQ ID NO: 5480 - protein, 36 aa, Homo sapiens
MNFYVTLYRVFPLAFSLSLTLSLNFLRLHNSIMKFT

SEQ ID NO: 5481 - protein, 47 aa, Homo sapiens
MKYQSEWKDVILLLHVPSPSFHGGTALPILSFVYAWPILRSSGDKPE

SEQ ID NO: 5482 - protein, 37 aa, Homo sapiens
LGLWALLAGLTLPVRAEPGWQEGRTVYLLLRAPKALL

SEQ ID NO: 5483 - protein, 31 aa, Homo sapiens
MPACFVSFSVFFCATVPCAGSMPASWHHLQC

SEQ ID NO: 5484 - protein, 38 aa, Homo sapiens
MIGTLHLSLSVILASVLFAYQNAVCFCQRITIKPLRPN

SEQ ID NO: 5485 - protein, 310 aa, Homo sapiens
  SITE (38): Xaa equals any of the naturally occurring L-amino acids
  SITE (40): Xaa equals any of the naturally occurring L-amino acids
  SITE (127): Xaa equals any of the naturally occurring L-amino acids
MVYKTLFALCILTAGWRVQSLPTSAPLSVSLPTNIVPXTXIWTSSPQNTDADTASPSNGTHNNSVLPVTASAPTSLLPKNISIESREEEITSPGSNWEGTNTDPSPSGFSSTSGGVHLTTTLEEHSXGTPEAGVAATLSQSAAEPPTLISPQAPASSPSSLSTSPPEVFSASVTTNHSSTVTSTQPTGAPTAPESPTEESSSDHTPTSHATAEPVPQEKTPPTTVSGKVMCELIDMETTTTFPRVIMQEVEHALSSGSIAAITVTVIAVVLLVFGVAAYLKIRHSSYGRLLDDHDYGSWGNYNNPLYDDS

SEQ ID NO: 5486 - protein, 25 aa, Homo sapiens
MVVFVFLPLLWLLQLPLSGTRRTIL

SEQ ID NO: 5487 - protein, 29 aa, Homo sapiens
MLCVLSSFLLIFLFLICVQFCAALLALLL

SEQ ID NO: 5488 - protein, 31 aa, Homo sapiens
EWTLRYFRCVLFSIAAVFVTVLVMVHVHILL

SEQ ID NO: 5489 - protein, 31 aa, Homo sapiens; identical to SEQ ID NO: 5488

SEQ ID NO: 5490 - protein, 36 aa, Homo sapiens
MQLSLPKIFFYLCFCLQLLPLEVSLSFKFREPCLWH

SEQ ID NO: 5491 - protein, 31 aa, Homo sapiens
MVHPLVALWPWASFFNFLIYTVNSTYIIGLV

SEQ ID NO: 5492 - protein, 72 aa, Homo sapiens
MLLSIAIWVAWITLLMLPDFDRSGMTPSSAPPWLPMAGCSCWLMLVPSFGCSQSNETPWIILLRMLSVNLNS

SEQ ID NO: 5493 - protein, 58 aa, Homo sapiens
MSHRAQPTFTSKVYVMVVIFSLLEYIKWLIWGGKLILNINGGEKGTVFTLKCKSEHTK

SEQ ID NO: 5494 - protein, 49 aa, Homo sapiens
MTTCKELCPWNFVWFFFVFDLLGRMSNIYKSRLNSEMNIQISIIQRLLL

SEQ ID NO: 5495 - protein, 35 aa, Homo sapiens
MITCSHGQIFFSPCSSWPETRETRVKSYLPLPVMP

SEQ ID NO: 5496 - protein, 36 aa, Homo sapiens
MALTLPSQWVFLVFILDDLYAHLSLSRNFCWKHLLF

SEQ ID NO: 5497 - protein, 34 aa, Homo sapiens
MIWNRSLLLAIYFLCGLRQVTYFSESPFLNLFVN

SEQ ID NO: 5498 - protein, 18 aa, Homo sapiens
MFNPLSPHPDLFLLSHLI

SEQ ID NO: 5499 - protein, 10 aa, Homo sapiens
LEFFFFFFVL

SEQ ID NO: 5500 - protein, 31 aa, Homo sapiens
MFLDFCWQACSSICMAPSPHLHFSAQMLPSP

SEQ ID NO: 5501 - protein, 9 aa, Homo sapiens
NLQFSMTQL

SEQ ID NO: 5502 - protein, 3 aa, Homo sapiens
MSV

SEQ ID NO: 5503 - protein, 26 aa, Homo sapiens
MLAIITFLKAHLGTHNMGQDQRVETS

SEQ ID NO: 5504 - protein, 6 aa, Homo sapiens
MCFLCV

SEQ ID NO: 5505 - protein, 25 aa, Homo sapiens
MAISLVTLLFPLLSSQFNLPTEYQA

SEQ ID NO: 5506 - protein, 67 aa, Homo sapiens
PPNLCLTFLLPFVLLRLSVLGNTVFLRVCGGSYPSSFRTRDLLDWSGPQTDPCSLTTGYPGTCVPSL

SEQ ID NO: 5507 - protein, 38 aa, Homo sapiens
MLVSPRRVYFLDLTCFVAFLLLVQCSVLTVCPQVTEEE

SEQ ID NO: 5508 - protein, 34 aa, Homo sapiens
MNITSHQPPHHNFMLLLDIIFVLAWILMLLTNIS

SEQ ID NO: 5509 - protein, 61 aa, Homo sapiens [sequence omitted]

SEQ ID NO: 5510 - protein, 24 aa, Homo sapiens
MWLWTSPWRSGLCWILLRGTSTEM

SEQ ID NO: 5511 - protein, 87 aa, Homo sapiens
MYIAHHLLTLGHQFRLRLAPILCDGTATFVDLVPGFRRLGTECFLAQMRAQKVNFWKDYQVLGTFQIWTMKRIILQQVKQSGRYCTN

SEQ ID NO: 5512 - protein, 31 aa, Homo sapiens
MFRPWHGLLPGSRLVPWGLVRLVGAPNPCAH

SEQ ID NO: 5513 - protein, 12 aa, Homo sapiens
MFIACLLQSLCI

SEQ ID NO: 5514 - protein, 28 aa, Homo sapiens
MVFQTFYCISLVLFAHEVSLLCVCVYVY

SEQ ID NO: 5515 - protein, 18 aa, Homo sapiens
MLCFSFLCLSLLLVSAQG

SEQ ID NO: 5516 - protein, 18 aa, Homo sapiens
MLCFSFLCLSLLLVSAQG

SEQ ID NO: 5517 - protein, 23 aa, Homo sapiens
MSSICPIFVLLQMISFMTLIALE

SEQ ID NO: 5518 - protein, 67 aa, Homo sapiens
MHTYILVCICIHIYLCVYAYIYTCMCMYICIHIYLYVYVHMHTYIYTHTYTHAYFFSQLGKGRICRL

SEQ ID NO: 5519 - protein, 112 aa, Homo sapiens
MALGVPISVYLLFNAMTALTEEAAVTVTPPITAQQGNWTVNKTEADNIEGPIALKFSHLCLEDHNSYCINGACAFHHELEKAICRCFTGYTGERCLKLKSPYNVCSGERRPL

SEQ ID NO: 5520 - protein, 34 aa, Homo sapiens
VAFFTMPTVVLVSMFDFFFSGISSSFVNIRLQFF

SEQ ID NO: 5521 - protein, 36 aa, Homo sapiens [sequence omitted]

SEQ ID NO: 5522 - protein, 34 aa, Homo sapiens
MNAVTLPILFTFVSPVPIVVHGAEWPFNKYLLNK

SEQ ID NO: 5523 - protein, 45 aa, Homo sapiens
MQEILPPGSHTGFSGLHLPFIGFTFTTERYVWIYHSPGRHFPCGR

SEQ ID NO: 5524 - protein, 65 aa, Homo sapiens
MIWLSVCLLLVYKNACDFCTLILYPETLLKLLISLRRFWAETMGFSRYTIMSSANRDNLTSSFPN

SEQ ID NO: 5525 - protein, 37 aa, Homo sapiens
MKSCQDSDSPFPVILLMISPNTLQATVTTKNTVSAGL

SEQ ID NO: 5526 - protein, 43 aa, Homo sapiens
MYLFRWFFVVTYFIVLISCFCITVPIANKSLGQFAFLKKKKKK

SEQ ID NO: 5527 - protein, 11 aa, Homo sapiens
MGLLDWLLGNS

SEQ ID NO: 5528 - protein, 32 aa, Homo sapiens
MGNLLLLQLMLLKLLTVIPFPWLFFGEKIICS

SEQ ID NO: 5529 - protein, 3 aa, Homo sapiens
MFP

SEQ ID NO: 5530 - protein, 25 aa, Homo sapiens
GRHTWSLLLAALACLVPLLHWNIRR

SEQ ID NO: 5531 - protein, 10 aa, Homo sapiens
MQAGWLGQVG

SEQ ID NO: 5532 - protein, 49 aa, Homo sapiens
MLTLCVCVCVCVCTRACACLLHGILFCEIPLQSCQNLPPCPSHTVGSAL

SEQ ID NO: 5533 - protein, 54 aa, Homo sapiens
MLQYKALSMSGKSLLQKRLQITLTCAWLCWMVYSVSFFFMGETAHRAHQQVLQN

SEQ ID NO: 5534 - protein, 39 aa, Homo sapiens
MLGDSSLALVWLGLCLPPWGKPGTPLLPALPRPLSLGGW

SEQ ID NO: 5535 - protein, 31 aa, Homo sapiens
DAWGWGELLLIVKNSLGASDLMPSILSGFSL

SEQ ID NO: 5536 - protein, 31 aa, Homo sapiens
MYNLLYFPLCILLWVFCGSQDSSLRFISHES

SEQ ID NO: 5537 - protein, 38 aa, Homo sapiens
MPSARHCIAIISFNLLLILWVGIFILISETRKLRVREN

SEQ ID NO: 5538 - protein, 40 aa, Homo sapiens
MSHFHSQNQMYLFSAFLWELLLSAGILKPNIHFQFFQLLS

SEQ ID NO: 5539 - protein, 18 aa, Homo sapiens
MQKVTTLRHIENCLAGKC

SEQ ID NO: 5540 - protein, 88 aa, Homo sapiens [sequence omitted]

SEQ ID NO: 5541 - protein, 12 aa, Homo sapiens
HTFLWFLYVCSN

SEQ ID NO: 5542 - protein, 55 aa, Homo sapiens
MSGWQAWYLARALAVGVLMGCTDHTAYVLAIPSCSPARSLKHTSLAFLFFCSFFN

SEQ ID NO: 5543 - protein, 80 aa, Homo sapiens; identical to SEQ ID NO: 3474

SEQ ID NO: 5544 - protein, 24 aa, Homo sapiens
MVVLLEIFLLLAYVLWNYTCITND

SEQ ID NO: 5545 - protein, 31 aa, Homo sapiens
MLATQHTLEHWLFTLLMVWLPSIKSYHTANR

SEQ ID NO: 5546 - protein, 39 aa, Homo sapiens
MHLLFLFVPMYQCRVALFSSTVFIAAFLSINLSHCIFYK

SEQ ID NO: 5547 - protein, 40 aa, Homo sapiens
RIRARCLAVAACSRGRVGLSRGWCCRCSRCRQSGRRHGFW

SEQ ID NO: 5548 - protein, 44 aa, Homo sapiens
MAGLSLPTLFFFNMILDCLGPWENSIYILKSVFTFLQIKRPLGF

SEQ ID NO: 5549 - protein, 2 aa, Homo sapiens
ML

SEQ ID NO: 5550 - protein, 31 aa, Homo sapiens
MFLYVSVVFLILLLNSSQLCKYTAIYLYTYF

SEQ ID NO: 5551 - protein, 31 aa, Homo sapiens
MSIPHLWCHFFTFLLPCIKRQKIHIKLCHVF

SEQ ID NO: 5552 - protein, 36 aa, Homo sapiens
MACLELLILVSFLTSVIQTQPPRELDPSLFSVFSLA

SEQ ID NO: 5553 - protein, 36 aa, Homo sapiens; identical to SEQ ID NO: 5552

SEQ ID NO: 5554 - protein, 4 aa, Homo sapiens
MHAL

SEQ ID NO: 5555 - protein, 12 aa, Homo sapiens
MIHRLQKLYELR

SEQ ID NO: 5556 - protein, 28 aa, Homo sapiens
MYFICNLLLLLGHIYVYIWMSVYIYMYK

SEQ ID NO: 5557 - protein, 74 aa, Homo sapiens
MKDFVVTGKRNPDCVFSLQGCPQRSYSLWLLLWVIGDNVLKKVLFFCLLKNRILKVISQKKWPSVKGLFPMCSA

SEQ ID NO: 5558 - protein, 36 aa, Homo sapiens
MVFPFLSFASSCTLSMVFSDSIFLNSLFIFLGNFLL

SEQ ID NO: 5559 - protein, 73 aa, Homo sapiens
MLHILFMGLRVNLNHETFLIICCEIYQAWMISVFLVVCCFFKEVIQVPLLSCQHTKLLKKLTISFRSNSQPVE

SEQ ID NO: 5560 - protein, 9 aa, Homo sapiens
SCSIRYDLF

SEQ ID NO: 5561 - protein, 34 aa, Homo sapiens
MFITPLSWSLLIWVLLGFLLLFLNYSRLLYILDF

SEQ ID NO: 5562 - protein, 51 aa, Homo sapiens
HFSKFTLSLLASGRYIYSHMVFTFFSIVLEALIMLVEQLTSRVFFPACHTC

SEQ ID NO: 5563 - protein, 30 aa, Homo sapiens
MFSIFFFMKTLFFPLIKHILLWCLFFLLAV

SEQ ID NO: 5564 - protein, 108 aa, Homo sapiens
ITYQDVGCPGVLPDSSLLVPIPNVLLSFFAFHNIKETTTLLPNSILCLLFHIKWELCLLRSAPPINYMCPRIIQARDTRWENISKKKSPLKASNLSEKVFYHTLTPYI

SEQ ID NO: 5565 - protein, 10 aa, Homo sapiens
MLLFLVSHLA

SEQ ID NO: 5566 - protein, 11 aa, Homo sapiens
VVIMLVIPLIV

SEQ ID NO: 5567 - protein, 26 aa, Homo sapiens
MSCKTLLKMVWFFFCFCLVFFFHENK

SEQ ID NO: 5568 - protein, 187 aa, Homo sapiens
NGVVHDVVLVLILGACIVVHAVTVTSLGNLFGGAGQTQQSWVEVLDVAGHGFNVVPLGVHSDEDRLHWRQTRLCFQLPHHLHQLLQLVWADVRAVSEAKVHQHPLAPEVSLAASPASVIQQVEVALAHSCLAQGFCSLLLLQPLLLSPQGQPGPTESSPEQACDQQPGSKPRALGLALPTCLCRALP

SEQ ID NO: 5569 - protein, 71 aa, Homo sapiens
GRLIWGALWPVPDCGCTAPEGQDQPPSLVCCHGCRPGSHAEVWQGCSRGQDYAGFSVGSGAGAPSLEEPRS

SEQ ID NO: 5570 - protein, 37 aa, Homo sapiens
MPSRTPPSSLLWLGWTWATTWMWLPCPSPCWSACAGG

SEQ ID NO: 5571 - protein, 33 aa, Homo sapiens
MPVVSVHRPVTVSTCVPSPGHPVKRAHFLQSGI

SEQ ID NO: 5572 - protein, 20 aa, Homo sapiens
MFFRLLTYLLFLLPTSADNS

SEQ ID NO: 5573 - protein, 38 aa, Homo sapiens
MWLILLAIPGVAAHAWLVWVHRGSHGWAQQRGPSGEGF

SEQ ID NO: 5574 - protein, 63 aa, Homo sapiens
MCFYHHRETAFKSTYLYGTAVTRHIHPSRTDACDPEARRSFVLGDVHIGIYLTAKEPFIYIYI

SEQ ID NO: 5575 - protein, 35 aa, Homo sapiens
MRLLTSGWLLWARTGPSWGARSRISLIWRCMACCV

SEQ ID NO: 5576 - protein, 44 aa, Homo sapiens
VLAAFVLGAALAAGLGLVCAHSAPHAPGPPARASPSGPQPRRSQ

SEQ ID NO: 5577 - protein, 65 aa, Homo sapiens
LPAGTWQPGRGAGAVGAAGGVDSSSEGRTRLAGGEDGVPAAQSPQGSPLRATKQDRAALVPGPSG

SEQ ID NO: 5578 - protein, 6 aa, Homo sapiens
MNTYLR

SEQ ID NO: 5579 - protein, 24 aa, Homo sapiens
MVLAKAQLLIFWLVILNQLQARYF

SEQ ID NO: 5580 - protein, 36 aa, Homo sapiens
MFLNLKFLLLLHFCESHLKFFREGILSFVQRCLYFY

SEQ ID NO: 5581 - protein, 13 aa, Homo sapiens
MDFQPFFPICSCF

SEQ ID NO: 5582 - protein, 39 aa, Homo sapiens
MSTPSVLLFYSSFLLIFILWDERLGSIEKNINHQFVTYP

SEQ ID NO: 5583 - protein, 39 aa, Homo sapiens
MLHPGLCCQAHFFLHLPPLTSAAPSCMPQFFLKSLDAFS

SEQ ID NO: 5584 - protein, 41 aa, Homo sapiens
QPLVSFLWLILSLSSTLRRQNGETKKATLKVFILSGYLAFF

SEQ ID NO: 5585 - protein, 34 aa, Homo sapiens
FLKALQVIFFLLFKNYNFYFLYCSFKTSCYSICR

SEQ ID NO: 5586 - protein, 59 aa, Homo sapiens
  SITE (24): Xaa equals any of the naturally occurring L-amino acids
MLSIDLLLFSLLFLLLCGYFLLIXRILLVNMLHIHIIWCPVFPFTYYTFHISTLSDISA

SEQ ID NO: 5587 - protein, 12 aa, Homo sapiens
MFSHPPPQPLLN

SEQ ID NO: 5588 - protein, 24 aa, Homo sapiens
MFIMAFILLISFYMLILISSSMSK

SEQ ID NO: 5589 - protein, 130 aa, Homo sapiens
MYQTPMEVAVYQLHNFSISFFSSLLGGDVVSVKLDNSASGASVVAIDNKIEQAMDLVKNHLMYAVREEVEILKEQIRELVEKNSQLERENTLLKTLASPEQLEKFQSCLSPEEPAPESPQVPEAPGGSAV

SEQ ID NO: 5590 - protein, 130 aa, Homo sapiens; identical to SEQ ID NO: 5589

SEQ ID NO: 5591 - protein, 97 aa, Homo sapiens
EFGFFFSLFLVISLFVWKESYFSLDITPEFPSDALLRVRAVADSLKFSSALPYLPFILGIGKCCKGPDGKYFRLYGLVSVANIQLCQCTLKAAIDNM

SEQ ID NO: 5592 - protein, 30 aa, Homo sapiens
MVCCVVFFFFWKESLLFIRFLKDSKTKKGL

SEQ ID NO: 5593 - protein, 36 aa, Homo sapiens
MRLKLLEYRTILLIVFLHSFSAWQRDGRGPDTDYLG

SEQ ID NO: 5594 - protein, 25 aa, Homo sapiens
MIHLKSVTSLMLLAINLGNMKQSCS

SEQ ID NO: 5595 - protein, 59 aa, Homo sapiens
EILLLSFLFIYLRFSLSFSSDLSPSICLSSFIFLSSPFLPASATSLVSWLLTFLRHRLL

SEQ ID NO: 5596 - protein, 49 aa, Homo sapiens
MLLRDIEVYFLGQVGIFYPCSFFILATHICSLAHPTAPPTRPRWILPQC

SEQ ID NO: 5597 - protein, 31 aa, Homo sapiens
MPTSQKQMPLFLCQNLMVLWLLLNPVNLEPI

SEQ ID NO: 5598 - protein, 36 aa, Homo sapiens
MHHQAGHFKLSSRNEFLCFLALLFAWGWERVVSSNC

SEQ ID NO: 5599 - protein, 39 aa, Homo sapiens
MPSLLHIIVRPFLLLWSPTISFVLYPGERGRVNGTGWFL

SEQ ID NO: 5600 - protein, 4 aa, Homo sapiens
MWRW

SEQ ID NO: 5601 - protein, 35 aa, Homo sapiens
MILSLVLSYNLFLVQLILCTITAEMSNWDRLASKA

SEQ ID NO: 5602 - protein, 51 aa, Homo sapiens [sequence omitted]

SEQ ID NO: 5603 - protein, 48 aa, Homo sapiens
  SITE (36): Xaa equals any of the naturally occurring L-amino acids
MFLLSLLLKMIHFIANSFLSSISSFLSVCHSDLCYXSYLVAILKVFKM

SEQ ID NO: 5604 - protein, 21 aa, Homo sapiens
MLRTDLIKLSWYLRHFLKGCI

SEQ ID NO: 5605 - protein, 30 aa, Homo sapiens
MIKAVLTFLKIHCLGWAGNSFEVTLIRLQC

SEQ ID NO: 5606 - protein, 46 aa, Homo sapiens
MSIIPCRPQPRAGRCYSLCFMLLLWPLFLPSSELCRVYCRQSEVSF

SEQ ID NO: 5607 - protein, 24 aa, Homo sapiens
CTTVVLFLLIELKQLYGAKVTGYS

SEQ ID NO: 5608 - protein, 45 aa, Homo sapiens
FNFDVILLLVIFAFVSCTFVSYPIMCIIYIYMHIHTHIYIYNRYI

SEQ ID NO: 5609 - protein, 45 aa, Homo sapiens; identical to SEQ ID NO: 5608

SEQ ID NO: 5610 - protein, 38 aa, Homo sapiens; identical to SEQ ID NO: 4691

SEQ ID NO: 5611 - protein, 17 aa, Homo sapiens [sequence omitted]

SEQ ID NO: 5612 - protein, 44 aa, Homo sapiens
MVLVSIFCLFACFQNSLAWYCMESSSFSSCPLRAGLFPVSSQRP

SEQ ID NO: 5613 - protein, 27 aa, Homo sapiens
ELGFLYCFLCNMIAETHFKNSEACHSC

SEQ ID NO: 5614 - protein, 19 aa, Homo sapiens
MQALQTACFFFLLLAQPFQ

SEQ ID NO: 5615 - protein, 41 aa, Homo sapiens
  SITE (31): Xaa equals any of the naturally occurring L-amino acids
MILLSVSLGRHWAFTYKFFLTPVVFVFFFFXFFHRKEYINL

SEQ ID NO: 5616 - protein, 34 aa, Homo sapiens
MSGPLHGHHSLLRLLAACTLILPHSLAASVNVKN

SEQ ID NO: 5617 - protein, 26 aa, Homo sapiens
MCVSVLSIFVPQLHCLNYSSFVSLSI

SEQ ID NO: 5618 - protein, 137 aa, Homo sapiens
MVHLTTLLCKAHRGGHLTIRLALGGCTNRPFYRIVAAHNKCPRDGRFVEQLGSYDPLPNSHGEKLVALNLDRIRHWIGCGAHLSKPMEKLLGLAGFFPLHPMMITNAERLRRKRAREVLLASQKTDAEATDTEATET

SEQ ID NO: 5619 - protein, 106 aa, Homo sapiens
MAVTALAARTWLGVWGVRTMQARGFGSDQSENVDRGAGSIREAGGAFGKREQAEEERYFRAQSREQLAALKKHHEEEIVHHKKEIERLQKEIERHKQKIKMLKHDD

SEQ ID NO: 5620 - protein, 21 aa, Homo sapiens
MCHGGLVHLSTHHLSFKLCMQ

SEQ ID NO: 5621 - protein, 37 aa, Homo sapiens
  SITE (37): Xaa equals any of the naturally occurring L-amino acids
MVLLSPAMSLLIFCLPALSISKNKKKKKKKEFKKLLX

SEQ ID NO: 5622 - protein, 25 aa, Homo sapiens
MWLTVSWLHTFHALDFCAFCRNDSR

SEQ ID NO: 5623 - protein, 35 aa, Homo sapiens
MGTQLLFLLCSILIPLCVELDYIFLKQSSLNNLVV

SEQ ID NO: 5624 - protein, 31 aa, Homo sapiens
MVEWTLAVLVCHLFLILYLFLFCENCLVVSC

SEQ ID NO: 5625 - protein, 31 aa, Homo sapiens
MHFFLPKQVSFPLSLITLLWPSLILQKISRL

SEQ ID NO: 5626 - protein, 57 aa, Homo sapiens
MTCSRSSIFLTLLLLGHRAIFSNMPEKLRSLITDNLQLFTSKSFGQIMPVKECKFYK

SEQ ID NO: 5627 - protein, 44 aa, Homo sapiens
MLLAPAVGQLLYIYWTLYFSRSFLRWVGFVSTLQVRKVKLRELK

SEQ ID NO: 5628 - protein, 14 aa, Homo sapiens
VLYYPYLAIYNMKV

SEQ ID NO: 5629 - protein, 31 aa, Homo sapiens
MVMHTRLLFRMSLWPVNCGQETYCKKKKKKK

SEQ ID NO: 5630 - protein, 31 aa, Homo sapiens
MRLLLIWQAFLCPKLTKSSQSFLFLAYPISL

SEQ ID NO: 5631 - protein, 42 aa, Homo sapiens
MNCGTRGCENLRWNLSFFLSFFLNFVFSIQQQCVERILCRCR

SEQ ID NO: 5632 - protein, 57 aa, Homo sapiens
LPSSVRHGLAQVLALVTFQHVTLGTCDLHLSGFVSSLLRCRQCTYNICYFRAMRCTS

SEQ ID NO: 5633 - protein, 66 aa, Homo sapiens
MGPRLCPVLGSACPASTLCWLLLASYWVLPCRDKHTGPEKLGRHEQVAGPSWTSFVSDPTIIQGPI

SEQ ID NO: 5634 - protein, 38 aa, Homo sapiens
MIWSLATLLSSLLLNMSRAFPSQWAFVLTISSAWMFLL

SEQ ID NO: 5635 - protein, 22 aa, Homo sapiens
MVTNYRSQLSFLQSLPQFYTFC

SEQ ID NO: 5636 - protein, 43 aa, Homo sapiens
MSIKCLHKTLQVLYFMRFLLLIKATKMNGKFILIKSTTWEEVR

SEQ ID NO: 5637 - protein, 42 aa, Homo sapiens
MAETPSLSHEGLIGIKLGFLWLWVLFFCCCFWFSVCFLVYGG

SEQ ID NO: 5638 - protein, 17 aa, Homo sapiens
MSENPLLAKSPESKFCF

SEQ ID NO: 5639 - protein, 32 aa, Homo sapiens
AFLAAALAQGLCEVLLVVTKEVEEKGSWLRTD

SEQ ID NO: 5640 - protein, 20 aa, Homo sapiens
GKCLINLVIGWVKYMGEFYM

SEQ ID NO: 5641 - protein, 67 aa, Homo sapiens
DTWFVSTFWLLLTVLLCTFLSKSLFGNLFSNSLKYLGMELLSFMIIQSLPSRGTPATVLFYILISSV

SEQ ID NO: 5642 - protein, 34 aa, Homo sapiens
MQFTDSRQCCLLFTLILFTVLSQFYFLEEWYSVL

SEQ ID NO: 5643 - protein, 29 aa, Homo sapiens
MVTIIILQPSSFPLPLRLNCYNADYLYSS

SEQ ID NO: 5644 - protein, 3 aa, Homo sapiens
TVW

SEQ ID NO: 5645 - protein, 32 aa, Homo sapiens
MSQCYRDFVYGQFWGQFMARFWGACSQHQEMC

SEQ ID NO: 5646 - protein, 3 aa, Homo sapiens
MFS

SEQ ID NO: 5647 - protein, 38 aa, Homo sapiens
MTYRLIVIFSFLLLLFRLDLGKSPGWLEGLRFMWSFVF

SEQ ID NO: 5648 - protein, 36 aa, Homo sapiens
MSSVDFHVLSSPFDIRGLKTPPLDHANTAIFCAWVP

SEQ ID NO: 5649 - protein, 39 aa, Homo sapiens
MCILIPFASVLLRIFASGILVCSFLVSLSGFGVREMQAS

SEQ ID NO: 5650 - protein, 16 aa, Homo sapiens
MIIIAKVVLFFNSSAS

SEQ ID NO: 5651 - protein, 35 aa, Homo sapiens
  SITE (17): Xaa equals any of the naturally occurring L-amino acids
MYLRIKYVSKLPGLLLXFFFVLFLRLWYSWEMQIG

SEQ ID NO: 5652 - protein, 7 aa, Homo sapiens
NFLFFLC

SEQ ID NO: 5653 - protein, 22 aa, Homo sapiens
MLTYTIMFSLIVEVISGGLSFI

SEQ ID NO: 5654 - protein, 31 aa, Homo sapiens
MQKSKQPRILCLILLVIPTLLQQYSCTCHIK

SEQ ID NO: 5655 - protein, 25 aa, Homo sapiens
FLFVPNVFSSFKNGSHPTRLPPYQD

SEQ ID NO: 5656 - protein, 22 aa, Homo sapiens
  SITE (8): Xaa equals any of the naturally occurring L-amino acids
MKLVIMYXILLAVSSLTVIKVI

SEQ ID NO: 5657 - protein, 38 aa, Homo sapiens
MRILHFQLTCCYIPTIIRPWRPVAWFPLSLLCFFLWHG

SEQ ID NO: 5658 - protein, 32 aa, Homo sapiens
MCMHTSSLLFLLVLLSDTYEKDHFPSLFPFVG

SEQ ID NO: 5659 - protein, 3 aa, Homo sapiens
GVT

SEQ ID NO: 5660 - protein, 8 aa, Homo sapiens
MTKEDSKL

SEQ ID NO: 5661 - protein, 13 aa, Homo sapiens
MAVGTFGVWLWGN

SEQ ID NO: 5662 - protein, 49 aa, Homo sapiens
  SITE (26): Xaa equals any of the naturally occurring L-amino acids
  SITE (30): Xaa equals any of the naturally occurring L-amino acids
MAFFHLLKGTGLFPPSLSSSVLCFVXDLFXWTIHRSALLFLLPLSVFSC

SEQ ID NO: 5663 - protein, 29 aa, Homo sapiens
IKIVLLFSCLFLFLLFVFLTSLYWEVTPV

SEQ ID NO: 5664 - protein, 28 aa, Homo sapiens
MCLYQFIFLFYWLVVFYLECTTVYPFTS

SEQ ID NO: 5665 - protein, 6 aa, Homo sapiens
FLSSLS

SEQ ID NO: 5666 - protein, 57 aa, Homo sapiens
MEFLHDVGVDAIAFSLLVFLLTVRPLCCRSAGVCCGSTPDPVSLSITSGGCRTAKTD

SEQ ID NO: 5667 - protein, 31 aa, Homo sapiens
MGFYLRVLRLVYVFQELLGHCGSAAPGTSCA

SEQ ID NO: 5668 - protein, 69 aa, Homo sapiens
MGRWPGTAGSLTLTWLRVEIWLVPWSGTCHSPNPKQSRVWAQDCPLPFETPSLVPASKTNREATLVAGS

SEQ ID NO: 5669 - protein, 9 aa, Homo sapiens
MQINDYFLS

SEQ ID NO: 5670 - protein, 40 aa, Homo sapiens
GGIYKFTLTVCAAHIRFLVLGLFLYSLHGDWQHQHHMSTT

SEQ ID NO: 5671 - protein, 20 aa, Homo sapiens
MIENPGRLFLSSVLFCFFAL

SEQ ID NO: 5672 - protein, 34 aa, Homo sapiens
MLLLLFLFWSKGAAEGEPGPVPAPAGFSETQRWR

SEQ ID NO: 5673 - protein, 36 aa, Homo sapiens
MGQMLLSVLLLLQWLCSHSASNLSSFSSVFTHLGRW

SEQ ID NO: 5674 - protein, 35 aa, Homo sapiens
MVCLLLRTLCPLCSRGKTGLEVNLSLFLYIEGRDQ

SEQ ID NO: 5675 - protein, 62 aa, Homo sapiens
MFEVFHFLAFVSNMVWICGAIQISHQIVSLNVVGGAWWEVTGLYGWILMNHLIPLPLVLSLP

SEQ ID NO: 5676 - protein, 41 aa, Homo sapiens
MIFLLFCSTFPLFKTSALATQDLRGAFLESCLKQEQITQKH

SEQ ID NO: 5677 - protein, 23 aa, Homo sapiens
QHCCLSSASCLGSPLVWEDCCAP

SEQ ID NO: 5678 - protein, 48 aa, Homo sapiens
MIQTPPTRPHLLTLGWSTCFLVWSHEIRTGAHIQTMSHTIQRIIAMCK

SEQ ID NO: 5679 - protein, 37 aa, Homo sapiens
MEWLVSPSHFLFLTYFSLLVSLDGEVLFMIRKEGISY

SEQ ID NO: 5680 - protein, 14 aa, Homo sapiens
MRGVEFCLVFWPCW

SEQ ID NO: 5681 - protein, 32 aa, Homo sapiens
MVGIWVCVCHLSVSQALKNISYSWHSSVHFGK

SEQ ID NO: 5682 - protein, 43 aa, Homo sapiens
MPFLLLLHAIEHSLSSHRIQFSHLRKAFPDSNRQVMHLFPVLT

SEQ ID NO: 5683 - protein, 35 aa, Homo sapiens
MLSYKTSIFCLFLFFPPFLTRGEKKTEGKKGGNES

SEQ ID NO: 5684 - protein, 22 aa, Homo sapiens
MCVCVCMYMHVFMCFLGLISLK

SEQ ID NO: 5685 - protein, 31 aa, Homo sapiens
MLALKLVLTAFSLVGCLLESPIGTARAITSL

SEQ ID NO: 5686 - protein, 24 aa, Homo sapiens
MVYMPACAVVVSGILELALSASLL

SEQ ID NO: 5687 - protein, 31 aa, Homo sapiens
MYCLCPFLLPSSNPLYSYCGLCSTVVYPSTR

SEQ ID NO: 5688 - protein, 16 aa, Homo sapiens
MNSMNYLFIFLVSLEA

SEQ ID NO: 5689 - protein, 35 aa, Homo sapiens
MVLHLHLQLCLVSVCKSKSLVQPFQATWPKLTKHP

SEQ ID NO: 5690 - protein, 625 aa, Homo sapiens
MELLPTHAFSTLFPVLQDNLEVYLGLQQFIVTSGSGHRLNITAENDCRRLHCSLRDLSSLLQAVGRLAEYFIGDVFAARFNDALTVVERLVKVTLYGSQIKLYNIETAVPSVLKPDLIDVHAQSLAALQAYSHWLAQYCSEVHRQNTQQFVTLISTTMDAITPLISTKVQDKLLLSACHLLVSLATTVRPVFLISIPAVQKVFNRITDASALRLVDKAQVLVCRALSNILLLPWPNLPENEQQWPVRSINHASLISALSRDYRNLKPSAVAPQRKMPLDDTKLIIHQTLSVLEDIVENISGESTKSRQICYQSLQESVQVSLALFPAFIHQSDVTDEMLSFFLTLFRGLRVQMGVPFTEQIIQTFLNMFTREQLAESILHEGSTGCRVVEKFLKILQVVVQEPGQVFKPFLPSIIALCMEQVYPIIAERPSPDVKAELFELLFRTLHHNWRYFFKSTVLASVQRGIAEEQMENEPQFSAIMQAFGQSFLQPDIHLFKQNLFYLETLNTKQKLYHKKIFRTAMLFQFVNVLLQVLVHKSHDLLQEEIGIAIYNMASVDFDGFFAAFLPEFLTSCDGVDANQKSVLGRNFKMDRDLPSFTQNVHRLVNDLRYYRLCNDSLPPGTVKL

SEQ ID NO: 5691 - protein, 35 aa, Homo sapiens
MPFVAWFCFCVFSTIHFSILASRKENQPSRLARLK

SEQ ID NO: 5692 - protein, 12 aa, Homo sapiens
WYSFCLVLRVSK

SEQ ID NO: 5693 - protein, 767 aa, Homo sapiens
MKGCLSCSYIEKFTDFLRLFVSVHLRRIESYSQFPVVEFLTLLFKYTFHQPTHEGYFSCLDIWTLFLDYLTSKIKSRLGDKEAVLNRYEDALVLLLTEVLNRIQFRYNQAQLEELDDETLDDDQQTEWQRYLRQSLEVVAKVMELLPTHAFSTLFPVLQDNLEVYLGLQQFIVTSGSGHRLNITAENDCRRLHCSLRDLSSLLQAVGRLAEYFIGDVFAARFNDALTVVERLVKVTLYGSQIKLYNIETAVPSVLKPDLIDVHAQSLAALQAYSHWLAQYCSEVHRQNTQQFVTLISTTMDAITPLISTKVQDKLLLSACHLLVSLATTVRPVFLISIPAVQKVFNRITDASALRLVDKAQVLVCRALSNILLLPWPNLPENEQQWPVRSINHASLISALSRDYRNLKPSAVAPQRKMPLDDTKLIIHQTLSVLEDIVENISGESTKSRQICYQSLQESVQVSLALFPAFIHQSDVTDEMLSFFLTLFRGLRVQMGVPFTEQIIQTFLNMFTREQLAESILHEGSTGCRVVEKFLKILQVVVQEPGQVFKPFLPSIIALCMEQVYPIIAERPSPDVKAELFELLFRTLHHNWRYFFKSTVLASVQRGIAEEQMENEPQFSAIMQAFGQSFLQPDIHLFKQNLFYLETLNTKQKLYHKKIFRTAMLFQFVNVLLQVLVHKSHDLLQEEIGIAIYNMASVDFDGFFAAFLPEFLTSCDGVDANQKSVLGRNFKMDRDLPSFTQNVHRLVNDLRYYRLCNDSLPPGTVKL

SEQ ID NO: 5694 - protein, 35 aa, Homo sapiens; identical to SEQ ID NO: 5691

SEQ ID NO: 5695 - protein, 35 aa, Homo sapiens; identical to SEQ ID NO: 5691

SEQ ID NO: 5696 - protein, 62 aa, Homo sapiens
MPLLQLFLFYYFLPSYLPSLPPETHTFLFFPLTIPGIFSRTTFLEVLLLLILKFAVPWLFSF

SEQ ID NO: 5697 - protein, 28 aa, Homo sapiens
MSRLREYLIFLLFFSSLAFNVETPFTSH

SEQ ID NO: 5698 - protein, 48 aa, Homo sapiens
MLPLATAKQCGIAGLECLLIFLLGFHIQFPLRGITWIIIGTLELMASM

SEQ ID NO: 5699 - protein, 30 aa, Homo sapiens
MSCFYILKVILHFLVLNYSIPIKICKILKT

SEQ ID NO: 5700 - protein, 47 aa, Homo sapiens
MIFKLCKFDSILLLGFYLILVVCFSFAEVSNCSSPTAPKFSILGAQL

SEQ ID NO: 5701 - protein, 32 aa, Homo sapiens
MPCMHCLLSSCILSACFSPCISIPWAPPVVPV

SEQ ID NO: 5702 - protein, 116 aa, Homo sapiens
SKNIFHAARTPATLFVVIFITYVIAGVTGFIGLDIIASLCNMIMGLTLITLCTWAYIRYSGEYRELGAVIDQVAAALWDQALYKLYSAAATHRHLYHQAFPTPKSESTEQSEKKKM

SEQ ID NO: 5703 - protein, 45 aa, Homo sapiens
RHSLFWILIQMILISTVSGSSQSALTPSACQGHPVQSLIEGEFPQ

SEQ ID NO: 5704 - protein, 23 aa, Homo sapiens
MLSIFCFIWFIYFLGFFMHILWH

SEQ ID NO: 5705 - protein, 36 aa, Homo sapiens
MPELFLLVPLPGTLLLSLSHGWPLSHSPSSYSETTF

SEQ ID NO: 5706 - protein, 33 aa, Homo sapiens
MLPIFVTLFFVCFVLFCLFCPTKTDLSSCDTTM

SEQ ID NO: 5707 - protein, 496 aa, Homo sapiens
RACNLPGRLRYAHRLSGFLHSHLRRIWLRRKWRCHWPRPLPQSCVGTEGGLQVRDTSSRIAKGGVDHTKMSLHGASGGHERSRDRRRSSDRSRDSSHERTESQLTPCIRNVTSPTRQHHVEREKDHSSSRPSSPRPQKASPNGSISSAGNSSRNSSQSSSDGSCKTAGEMVFVYENAKEGARNIRTSERVTLIVDNTRFVVDPSIFTAQPNTMLGRMFGSGREHNFTRPNEKGEYEVAEGIGSTVFRAILDYYKTGIIRCPDGISIPELREACDYLCISFEYSTIKCRDLSALMHELSNDGARRQFEFYLEEMILPLMVASAQSGERECHIVVLTDDDVVDWDEEYPPQMGEEYSQIIYSTKLYRFFKYIENRDVAKSVLKERGLKKIRLGIEGYPTYKEKVKKRPGGRPEVIYNYVQRPFIRMSWEKEEGKSRHVDFQCVKSKSITNLAAAAADIPQDQLVVMHPTPQVDELDILPIHPPSGNSDLDPDAQNPML

SEQ ID NO: 5708 - protein, 63 aa, Homo sapiens
MKLSSLSRLTKSTSTAGALWNVPTGRTWLLVLASTSISFSISSPTTSWNCSAASTGPMSLTPS

SEQ ID NO: 5709 - protein, 55 aa, Homo sapiens [sequence omitted]

SEQ ID NO: 5710 - protein, 96 aa, Homo sapiens
MVCQSLLLLDQLSCPSVSFLGLLCGLLVCKHLSVSKPAVRSSLTITEYTWYTKTHVEEKKITEVPKNTYNWTKNWLIFFFKERAASVYYLQRSSFH

SEQ ID NO: 5711 - protein, 25 aa, Homo sapiens
MYQVVPLKKCLSLLGTLMTQPITLA

SEQ ID NO: 5712 - protein, 169 aa, Homo sapiens
MAEPEKAPALSILLYVQAFQVGMPPPGCCRGPLRPKTLLLTSSEIFLLDEDCVHYPLPEFAKEPPQRDRYRLDDGRRVRDLDRVLMGYQTYPQALTLVFDDVQGHDLMGSVTLDHFGEVPGGPARASQGREVQWQVFVPSAESREKLISLLARQWEALCGRELPVELTG

SEQ ID NO: 5713 - protein, 13 aa, Homo sapiens
MSPCPLLCFSVGF

SEQ ID NO: 5714 - protein, 14 aa, Homo sapiens
MLPCVLDGFLQACL

SEQ ID NO: 5715 - protein, 48 aa, Homo sapiens
MELLCWSCWCVCLGWLHTGWPASGTALGTMRSLTRTPRQSATTAGCTN

SEQ ID NO: 5716 - protein, 38 aa, Homo sapiens
EPLCLSRLVLSTVHFSLSVPWALMKKQNAPNFIHLPSL

SEQ ID NO: 5717 - protein, 72 aa, Homo sapiens
MSSKTASTNNIAQARRTVQQLRLEASIERIKVSKASADLMSYCEEHARSDPLLIGIPTSENPFKDKKTCIIL

SEQ ID NO: 5718 - protein, 57 aa, Homo sapiens
WVDWQRKWTTKFFMLRSFLLETSQIFRFLWIMKQKSTEDLLLLNLSWQRMLQQLSTT

SEQ ID NO: 5719 - protein, 93 aa, Homo sapiens
GKGSQPPSPPSPAPSSFSSTSVSSLEAEAYAAFPGLGQVPKQLAQLSEAKDLQARKAFNCKYCNKEYLSLGALKMHIRSHTLPCVCGTCGKLL

SEQ ID NO: 5720 - protein, 36 aa, Homo sapiens
MGSCTWSIWLWMVSGVACRSQGLSDCSPKAFLWSFA

SEQ ID NO: 5721 - protein, 21 aa, Homo sapiens
MYQTAWIDSLPLLSFLVTSVT

SEQ ID NO: 5722 - protein, 37 aa, Homo sapiens
MGLVSNFVIFLVFVSDFLFKNKVLSECFDFPVTTKFL

SEQ ID NO: 5723 - protein, 26 aa, Homo sapiens
MAHSTARWLWWLPRMWTPVPSWRYSL

SEQ ID NO: 5724 - protein, 4 aa, Homo sapiens
YSLT

SEQ ID NO: 5725 - protein, 57 aa, Homo sapiens
EPPSLELWEKLLLLEVPVAEKFPNRTDSFIPPEFRERSMWTHVPLHQRLLSRHSSST

SEQ ID NO: 5726 - protein, 111 aa, Homo sapiens
FLLFLLFLLQGKYKISLEWASRFIQPPPGHRFREREEEGRFGASTTTSFPHALLSPFPSFSTSSFPSLPSMICPCPSVSSSFPSFLPFLLPSLAGSNEQVALNLDSTITGG

SEQ ID NO: 5727 - protein, 32 aa, Homo sapiens
MSPPALFLFIHVLFLYQYCFGYVESLAFLYKF

SEQ ID NO: 5728 - protein, 15 aa, Homo sapiens
MWSVRSILFVLLSLM

SEQ ID NO: 5729 - protein, 613 aa, Homo sapiens
MFRCGGLAAGALKQKLVPLVRTVCVRSPRQRNRLPGNLFQRWHVPLELQMTRQMASSGASGGKIDNSVLVLIVGLSTVGAGAYAYKTMKEDEKRYNERISGLGLTPEQKQKKAALSASEGEEVPQDKAPSHVPFLLIGGGTAAFAAARSIRARDPGARVLIVSEDPELPYMRPPLSKELWFSDDPNVTKTLRFKQWNGKERSIYFQPPSFYVSAQDLPHIENGGVAVLTGKKVVQLDVRDNMVKLNDGSQITYEKCLIATGGTPRSLSAIDRAGAEVKSRTTLFRKIGDFRSLEKISREVKSITIIGGGFLGSELACALGRKARALGTEVIQLFPEKGNMGKILPEYLSNWTMEKVRREGVKVMPNAIVQSVGVSSGKLLIKLKDGRKVETDHIVAAVGLEPNVELAKTGGLEIDSDFGGFRVNAELQARSNIWVAGDAACFYDIKLGRRRVEHHDHAVVSGRLAGENMTGAAKPYWHQSMFWSDLGPDVGYEAIGLVDSSLPTVGVFAKATAQDNPKSATEQSGTGIRSESETESEASEITIPPSTPAVPQAPVQGEDYGKGVIFYLRDKVVVGIVLWNIFNRMPIARKIIKDGEQHEDLNEVAKLFNIHED

SEQ ID NO: 5730 - protein, 36 aa, Homo sapiens
MEKREAYISSHLLSMSLLRTCLILRMVVWLSSLGRR

SEQ ID NO: 5731 - protein, 14 aa, Homo sapiens
MPFIPSFPFLWPLL

SEQ ID NO: 5732 - protein, 1 aa, Homo sapiens
M

SEQ ID NO: 5733 - protein, 30 aa, Homo sapiens
MLVALLCLIRILGEMESFPQGAAGGRIGSI

SEQ ID NO: 5734 - protein, 12 aa, Homo sapiens
EQSLLYFILCCF

SEQ ID NO: 5735 - protein, 44 aa, Homo sapiens [sequence omitted]

SEQ ID NO: 5736 - protein, 31 aa, Homo sapiens
MLPLLIWFLASPCVLRASQTIHLWVALLFVI

SEQ ID NO: 5737 - protein, 181 aa, Homo sapiens
QLAAPAFPSPSLSYRFMLVLASNLPEQFDCAINSRIDVMVHFDLPQQEERERLVRLHFDNCVLKPATEGKRRLKLAQFDYGRKCSEVARLTEGMSGREIAQLAVSWQATAYASKDGVLTEAMMDACVQDAVQQYRQKMRWLKAEGPGRGVDTPYPESKARPHLMEPGHGPLLPLPCRPLHI

SEQ ID NO: 5738 - protein, 4 aa, Homo sapiens
MIIL

SEQ ID NO: 5739 - protein, 4 aa, Homo sapiens
MIIL

SEQ ID NO: 5740 - protein, 4 aa, Homo sapiens
MIIL

SEQ ID NO: 5741 - protein, 4 aa, Homo sapiens
MIIL

SEQ ID NO: 5742 - protein, 39 aa, Homo sapiens
MYSLASIMQIKKYFSLSVFLALVSSCCFCLDLERLQLSN

SEQ ID NO: 5743 - protein, 20 aa, Homo sapiens
MSATVSGRSHLWPLFACEKV

SEQ ID NO: 5744 - protein, 97 aa, Homo sapiens
LMLSLCLPPILSGTGDGGSPCEPFSCCSGRASSTLSQPGPMENDGLGFLRPYLMPLQFMSPTRPRGSGWERAPGCPVTPLTLPSPVPNMPCNKIRED

SEQ ID NO: 5745 - protein, 19 aa, Homo sapiens
MVVCHTHLWDSAWLFGCHL

SEQ ID NO: 5746 - protein, 17 aa, Homo sapiens
CVFTVDWSLKAPLGENM

SEQ ID NO: 5747 - protein, 36 aa, Homo sapiens
MSIFRCFKLPFVFEAFLIFLAISYFLFCDKKIRQTC

SEQ ID NO: 5748 - protein, 38 aa, Homo sapiens
MVDPLAISCGVLLLLCHFSMPEDTKMISRQSYHIAASL

SEQ ID NO: 5749 - protein, 81 aa, Homo sapiens
MRTNQSLCSFLLWSVPFHQAACPQAKDHPLEPSMHPEGTQLQSCSTMLGPRQLSSEKQPLLPPRSHLKSSPMLRACKGLTS

SEQ ID NO: 5750 - protein, 50 aa, Homo sapiens
MAILRTWIKISMMTVLMTVTPTNQMEKVTGMNLCTVIMVRETTMKKRSQV

SEQ ID NO: 5751 - protein, 16 aa, Homo sapiens
MLTGVLLSHILCAVIC

SEQ ID NO: 5752 - protein, 46 aa, Homo sapiens
MSLLSNVTWSFYTLHFFFIIMKNGIPPGSSKILLTETNVGVRKITI

SEQ ID NO: 5753 - protein, 26 aa, Homo sapiens
MFTVLLLELFSHPTYAGFSIAFEFCV

SEQ ID NO: 5754 - protein, 51 aa, Homo sapiens
MLPHLPLSGSLLCLSCSVRSFSCSTDWLPPSDSGTWLSKLTNFTSCNIHHQ

SEQ ID NO: 5755 - protein, 61 aa, Homo sapiens
WRRGVGSCCWPSQPCWWPTSARLRTRTVPSSVCSCRWTTWSPVWPWSARKLLQSCRRTSMS

SEQ ID NO: 5756 - protein, 115 aa, Homo sapiens
MKPVSLISLSILSLWGILVAFLVTECACRTLSSPWPLAAVLCSPCLCRAWPPQQACWLWASPVLRLHAHSLGSLSHLGSGPTSKLVNLGLHPVARCLLPDAFACLSHTGSSSKAP

SEQ ID NO: 5757 - protein, 13 aa, Homo sapiens
MIIYLYLFVVIVA

SEQ ID NO: 5758 - protein, 345 aa, Homo sapiens
MAAAFRPSNRVLLQALQILVYPGVGGSGSVSCRCPLGAKRYLLTDNVVKLKEFQQKKVAVACNLSGTKETYFRNLKKKLTQNKLILKGELITLLHLCESRDHVELAKNVIYRYHAENKNFTLGEYKFGPLFVRLCYELDLEESAVELMKDQHLRGFFSDSTSFNILMDMLFIKGKYKSALQVLIEMKNQDVKFTKDTYVLAFAICYKLNSPESFKICTTLREEALLKGEILSRRASCFAVALALNQNEMAKAVSIFSQIMNPESIACINLNLAKVREKVKDVPALVAKFDEIYGTLHITGQVTTDSLDAVLCHTPRDRKSHTLLLNKRMVSRRTFQPLSQSLLAE

SEQ ID NO: 5759 - protein, 107 aa, Homo sapiens
MGSSLGLCLGKAPSSSQLFLFFAMGSDVQPGTEMEIVVEETISVRDCLKLMLKKSGLQGDAWHLRKMDWCYEAGEPLCEEDATLKELLICSGDTLLLIEGQLPPLGS

SEQ ID NO: 5760 - protein, 42 aa, Homo sapiens
MFAASIWSALPVCLFLFSVFSIFSSLVHAFCFALVPGAYLPN

SEQ ID NO: 5761 - protein, 69 aa, Homo sapiens
MFYSVAFSIFAMLCNHRHYPFLELFRHPRQTLCIHKKITSYLSLPLVFGNLCYTGKLCWLCVCVEFGLF

SEQ ID NO: 5762 - protein, 350 aa, Homo sapiens
MRFNLKEVLQVMPSDSFFFSIVRDPAALARSAFSYYKSTSSAFRKSPSLAAFLANPRGFYRPGARGDHYARNLLWFDFGLPFPPEKRAKRGNIHPPRDPNPPQLQVLPSGAGPRAQTLNPNALIHPVSTVTDHRSQISSPASFDLGSSSFIQWGLAWLDSVFDLVMVAEYFDESLVLLADALCWGLDDVVGFMHNAQAGHKQGLSTVSNSGLTAEDRQLTARARAWNNLDWALYVHFNRSLWARIEKYGQGRLQTAVAELRARREALAKHCLVGGEASDPKYITDRRFRPFQFGSAKVLGYILRSGLSPQDQEECERLATPELQYKDKLDAKQFPPTVSLPLKTSRPLSP

SEQ ID NO: 5763 - protein, 36 aa, Homo sapiens
MVSCFTGVDSTWLLYIVFFVFFIDIVVHIFRIHMVF

SEQ ID NO: 5764 - protein, 58 aa, Homo sapiens [sequence omitted]

SEQ ID NO: 5765 - protein, 5 aa, Homo sapiens
PGNLL

SEQ ID NO: 5766 - protein, 10 aa, Homo sapiens
MCFLLLPCLL

SEQ ID NO: 5767 - protein, 30 aa, Homo sapiens
MALLYFTSLLLIPRTMSSTLYVLNKYLVGG

SEQ ID NO: 5768 - protein, 26 aa, Homo sapiens
MQCQLLCLVVYLFLFVLVMLTYVFSV

SEQ ID NO: 5769 - protein, 15 aa, Homo sapiens
MHNSNFAYHLLLNLQ

SEQ ID NO: 5770 - protein, 45 aa, Homo sapiens
MKAPPSHWSLWLSFCHPPPWLFALNKLAQRALEKHFIPSSYANSV

SEQ ID NO: 5771 - protein, 53 aa, Homo sapiens
MLFLLCSYFICVSHSFVSTYYSVYFCFLTCLHSVVPTYMLRSQMDYDIRKKAE

SEQ ID NO: 5772 - protein, 4 aa, Homo sapiens
METD

SEQ ID NO: 5773 - protein, 9 aa, Homo sapiens
LVTVSSHKI

SEQ ID NO: 5774 - protein, 46 aa, Homo sapiens
MPVTPFSSFFCASMIVTPFLFFFFFETAWATERDSISKKKKKYIYI

SEQ ID NO: 5775 - protein, 12 aa, Homo sapiens
KILIVLLWLVLQ

SEQ ID NO: 5776 - protein, 28 aa, Homo sapiens
PRLACLLSSLLLRIVFLPHTPLAPCSLL

SEQ ID NO: 5777 - protein, 34 aa, Homo sapiens
MPRPSLTLGLLLPSQHLCANHTLLQHFFNPKIIA

SEQ ID NO: 5778 - protein, 16 aa, Homo sapiens
MCVTAIYKPIWCNSYP

SEQ ID NO: 5779 - protein, 29 aa, Homo sapiens
MKLLFFLMRDVNSISLLYLITCLPCFCVT

SEQ ID NO: 5780 - protein, 14 aa, Homo sapiens
MASHGGFDLHFPGV

SEQ ID NO: 5781 - protein, 8 aa, Homo sapiens
MVNLCLEV

SEQ ID NO: 5782 - protein, 55 aa, Homo sapiens
MKEAFRWALFSMQATGHVLLGTSCYLQQLLDATEEGQPPKGKASSLIPTCLKILQ

SEQ ID NO: 5783 - protein, 55 aa, Homo sapiens
IPLTMRLTKTFTFVQKVKKKKTWLRKRRHVTSSYTPITVALQKIKITTFKKINLI

SEQ ID NO: 5784 - protein, 12 aa, Homo sapiens
MFSLEVLFLFAG

SEQ ID NO: 5785 - protein, 43 aa, Homo sapiens
LCLITWLLFPTCTMTKMPSTYLIQPFQYNSYTCHLSKPKGTSS

SEQ ID NO: 5786 - protein, 18 aa, Homo sapiens
MSSLQIFSPILWLVSSLC

SEQ ID NO: 5787 - protein, 55 aa, Homo sapiens
  SITE (18): Xaa equals any of the naturally occurring L-amino acids
  SITE (31): Xaa equals any of the naturally occurring L-amino acids
MIAAPLWSACFLVRVPSXVSLGAPSSLSSSXSPLAVAVVAAHAPGIPLQHSLLSS

SEQ ID NO: 5788 - protein, 37 aa, Homo sapiens
MKQICTGTIALLWLEMPLFWGQTFKMPLCLPVRSPKH

SEQ ID NO: 5789 - protein, 37 aa, Homo sapiens
MIIWGCLLIVSVCVEGTESFRLGNSNLLFMIKYKSRM

SEQ ID NO: 5790 - protein, 44 aa, Homo sapiens
MFVISHVLVICCLWVWTEFVGKTIFCIGYSSQQCPPQKAFSQNI

SEQ ID NO: 5791 - protein, 33 aa, Homo sapiens
  SITE (26): Xaa equals any of the naturally occurring L-amino acids
  SITE (32): Xaa equals any of the naturally occurring L-amino acids
MTFLTSFPIILHLAPCSSCSSFFFFXLFQICXF

SEQ ID NO: 5792 - protein, 49 aa, Homo sapiens
MASGFLFCWAKALWGWRGWCWCCTGLTAALTQRFPPSLLPVCCVDLFLV

SEQ ID NO: 5793 - protein, 33 aa, Homo sapiens
CMFILVNMIVVSAPVAHGVLPRICDSVNDMYLN

SEQ ID NO: 5794 - protein, 45 aa, Homo sapiens; identical to SEQ ID NO: 3194
  SITE (31): Xaa equals any of the naturally occurring L-amino acids

SEQ ID NO: 5795 - protein, 13 aa, Homo sapiens
HVLFDAFSLLHCF

SEQ ID NO: 5796 - protein, 81 aa, Homo sapiens
  SITE (22): Xaa equals any of the naturally occurring L-amino acids
MECLLYRTICLFYFLVRFLFSXLLLMKLFLPIINPNSWTLWLGNSLNFQPYGIIVSLSLSLLLSLFSSSPYFLSNKYCLLI

SEQ ID NO: 5797 - protein, 218 aa, Homo sapiens
MAMFEQMRANVGKLLKGIDRYNPENLATLERYVETQAKENAYDLEANLAVLKLYQFNPAFFQTTVTAQILLKALTNLPHTDFTLCKCMIDQAHQEERPIRQILYLGDLLETCHFQAFWQALDENMDLLEGITGFEDSVRKFICHVVGITYQHIDRWLLAEMLGDLSDSQLKVWMSKYGWSADESGQIFICSQEESIKPKNIVEKIDFDSVSSIMASSQ

SEQ ID NO: 5798 - protein, 30 aa, Homo sapiens
MASSLLAQIVLGGWLFVGAFNIQRGEYCSD

SEQ ID NO: 5799 - protein, 12 aa, Homo sapiens
MTKILWLFLFLL

SEQ ID NO: 5800 - protein, 27 aa, Homo sapiens
MFGVLLVYLLFYTFATISLVNGMVWGF

SEQ ID NO: 5801 - protein, 22 aa, Homo sapiens
EWNIFLLFSCICLYFSLMNDWS

SEQ ID NO: 5802 - protein, 12 aa, Homo sapiens
RPLWGLGKRSLH

SEQ ID NO: 5803 - protein, 27 aa, Homo sapiens
  SITE (11): Xaa equals any of the naturally occurring L-amino acids
  SITE (27): Xaa equals any of the naturally occurring L-amino acids
MKSDLGPELQXSLILQNTIISAYEKDX

SEQ ID NO: 5804 - protein, 31 aa, Homo sapiens
MWPCMTLLLLYFLFPFQMGIRTVGQQQSQSQ

SEQ ID NO: 5805 - protein, 30 aa, Homo sapiens
TLITCFANFKCLNISETSSKYVGQLKNFDC

SEQ ID NO: 5806 - protein, 43 aa, Homo sapiens
MPLLFFSVSTLFSGSVTLQQRGMFLPWTGTGNRCLPCYGHGLN

SEQ ID NO: 5807 - protein, 20 aa, Homo sapiens
KQLYLESYCLGFLIRHSSPD

SEQ ID NO: 5808 - protein, 14 aa, Homo sapiens
LRPRSPGLAGRGCL

SEQ ID NO: 5809 - protein, 73 aa, Homo sapiens
MGCFVVVVVFVVGHLSIFSHQFCSLLAMDKIGSFWLIKKDNFIKWHFKQAIVSFIICNAHGKAKTFVMKELLI

SEQ ID NO: 5810 - protein, 117 aa, Homo sapiens
VAVHLFALMISTCILPNIEAVSNVHNLNSVKESPHERMHRHIELAWAFSTVIGTLLFLAEVVLLCWVKFLPLKKQPGQPRPTSKPPASGAQPTSAPAASPRARQLPSPRPPSWCPSA

SEQ ID NO: 5811 - protein, 34 aa, Homo sapiens
MSNERFRFRSLTFHLPLFPVVAMFPRLPSQKPCE

SEQ ID NO: 5812 - protein, 27 aa, Homo sapiens
MARHSTSTCFRRSWWRTWCLAAGWAPP

SEQ ID NO: 5813 - protein, 28 aa, Homo sapiens
MVKTVFAHCFLLFHLVTNDQDDLIFFPS

SEQ ID NO: 5814 - protein, 14 aa, Homo sapiens
MCPRLLFSWAFLSR

SEQ ID NO: 5815 - protein, 56 aa, Homo sapiens [sequence omitted]

SEQ ID NO: 5816 - protein, 39 aa, Homo sapiens
MRMLREIVGCLEFHYIFCFYFLIPRCFLKYSDKYLSYID

SEQ ID NO: 5817 - protein, 36 aa, Homo sapiens
MQLFSLFFSFPPSLHPSPIPPSLPYSSRLPPSLPPS

SEQ ID NO: 5818 - protein, 36 aa, Homo sapiens
MDNRTALSVGMVVLLEDCIIGGLVSSSLPGQSSEVL

SEQ ID NO: 5819 - protein, 92 aa, Homo sapiens
MACILFSLLCLILFDFPLQHSVSVKGFYAFTSHVLNTLRTTHLVFTLLPVNVWNLESHRVALKQCVFSLRSSAHFATTREEFSAKANPCSLT

SEQ ID NO: 5820 - protein, 22 aa, Homo sapiens
ERCLLILCVVTQRSSTFPSLCR

SEQ ID NO: 5821 - protein, 70 aa, Homo sapiens
MWLLINLTASRCSSPPCQALCLLIALWGHSLIYSPALGNRSCHYPSLSAQGKINALRIVIIFPRLPSWWC

SEQ ID NO: 5822 - protein, 27 aa, Homo sapiens
ARVCSKVTLLLFWTLLSGKKGCRLPAM

SEQ ID NO: 5823 - protein, 350 aa, Homo sapiens [sequence omitted]

SEQ ID NO: 5824 - protein, 55 aa, Homo sapiens
MYCLWLLLLYNSWVEYLEQRPNVWQKSNIFTILYRKKMSTYIYTYYNFSKNTEFK

SEQ ID NO: 5825 - protein, 27 aa, Homo sapiens
MTVMVTLLFLLRYVTALRLTRATWSCW

SEQ ID NO: 5826 - protein, 71 aa, Homo sapiens
MIMSSSNSSIWPAMPCMLLSVYSYLFSCISHGSPRLSALQPPKPCSSFSNSSAPYLRAFASARCTSFPYFT

SEQ ID NO: 5827 - protein, 57 aa, Homo sapiens
MDFLCFLLLSGATPALTSSGTSCQHSPHSLMPQSCHTRLIPCLPVCLQPDAARPRLP

SEQ ID NO: 5828 - protein, 2 aa, Homo sapiens
FP

SEQ ID NO: 5829 - protein, 24 aa, Homo sapiens
IRRVLWAPGQPSCLSSPAVSRGRW

SEQ ID NO: 5830 - protein, 24 aa, Homo sapiens
IRRVLWAPGQPSCLSSPAVSRGRW

SEQ ID NO: 5831 - protein, 24 aa, Homo sapiens
IRRVLWAPGQPSCLSSPAVSRGRW

SEQ ID NO: 5832 - protein, 54 aa, Homo sapiens
MCQTWARCLRLMFHPTCLTCPALPTTSCTLPTWAPALPPLPLAPFQNCPPSTLR

SEQ ID NO: 5833 - protein, 13 aa, Homo sapiens
MLPGVLWYLARCR

SEQ ID NO: 5834 - protein, 31 aa, Homo sapiens
MVGPRLPMGLLFVASFLFLFIQCVHMPRSYL

SEQ ID NO: 5835 - protein, 89 aa, Homo sapiens
  SITE (67): Xaa equals any of the naturally occurring L-amino acids
  SITE (70): Xaa equals any of the naturally occurring L-amino acids
  SITE (79): Xaa equals any of the naturally occurring L-amino acids
MRSPHVRVHLVYFQRLARGSDERTCSAPAFSSFREFSRGLQRFPHAASHSSCTIVHSNSNGQGLQSXRIXANIYYFMWXFFLFFFFFFF

SEQ ID NO: 5836 - protein, 11 aa, Homo sapiens
VKTSHVFESEN

SEQ ID NO: 5837 - protein, 91 aa, Homo sapiens
MNKSTFLFLIIMWPNVYISLSVAHHIVLTKTISSFTPAQIFKYSLLFPTSVSGIAILFKTYLKNVQASHLCVKLFSLFQCDEKNWTEHTFL

SEQ ID NO: 5838 - protein, 37 aa, Homo sapiens
MYMLVCICVFILNSYICCIYLVLSMLYDSTTSKMDQV

SEQ ID NO: 5839 - protein, 40 aa, Homo sapiens
LCLMCWWLPGGLASDSEEDTKKLIVSLNWLFYLLRLCLSY

SEQ ID NO: 5840 - protein, 36 aa, Homo sapiens
MHLCCNLCWYALDLVFPWFFAAVSQVARFDISLSLI

SEQ ID NO: 5841 - protein, 2 aa, Homo sapiens
SL

SEQ ID NO: 5842 - protein, 31 aa, Homo sapiens
MGMSSPAFQKQKEGQSDLLVPAFCFCFCFCF

SEQ ID NO: 5843 - protein, 15 aa, Homo sapiens
MCIFLVSTSTLLALP

SEQ ID NO: 5844 - protein, 6 aa, Homo sapiens
MISVHL

SEQ ID NO: 5845 - protein, 44 aa, Homo sapiens
  SITE (14): Xaa equals any of the naturally occurring L-amino acids
  SITE (26): Xaa equals any of the naturally occurring L-amino acids
  SITE (27): Xaa equals any of the naturally occurring L-amino acids
MCLLIVTPGIGFLXFIVRIGGSGDTXXVEWRRKDLLIIREEHVG

SEQ ID NO: 5846 - protein, 28 aa, Homo sapiens
KELLISLVASLFMGFGVLFLLLWVGIYV

SEQ ID NO: 5847 - protein, 25 aa, Homo sapiens
MKSCLWFLTSLSRVSASLGELHISS

SEQ ID NO: 5848 - protein, 23 aa, Homo sapiens
MFQWFFLFVVFVFVLPFSFTGLF

SEQ ID NO: 5849 - protein, 18 aa, Homo sapiens
MCLCVCVCVCARACALVA

SEQ ID NO: 5850 - protein, 21 aa, Homo sapiens
MFSCFFLLPMFCILTPLLSGI

SEQ ID NO: 5851 - protein, 26 aa, Homo sapiens
MQCVYHSIWYTAMVIPFLFSFQIIAP

SEQ ID NO: 5852 - protein, 5 aa, Homo sapiens
MNNDC

SEQ ID NO: 5853 - protein, 92 aa, Homo sapiens
VGSPTRQIATLLCLALWILPLLFLPSLCLWLYPSPPSISLSLVSLLSLDHVFFISMYLPLVMCASYLKVCPSFISFVNLGNYMSIPGLFWIE

SEQ ID NO: 5854 - protein, 9 aa, Homo sapiens
FCTHAFTSE

SEQ ID NO: 5855 - protein, 100 aa, Homo sapiens
  SITE (14): Xaa equals any of the naturally occurring L-amino acids
  SITE (22): Xaa equals any of the naturally occurring L-amino acids
  SITE (30): Xaa equals any of the naturally occurring L-amino acids
  SITE (45): Xaa equals any of the naturally occurring L-amino acids
  SITE (50): Xaa equals any of the naturally occurring L-amino acids
MCPSALHTFTPAMXSCAAYLGXPTQCSTSXPAPLKTQSHMNLAFXFSNIXTSVLLVPTSPSPAWRKGYFQGTTVVQLSQVFLLSINHPAALGCPASQPSG

SEQ ID NO: 5856 - protein, 16 aa, Homo sapiens
MAKKVPVYLMPSFPCC

SEQ ID NO: 5857 - protein, 16 aa, Homo sapiens
VATVSGEQNRTTVILG

SEQ ID NO: 5858 - protein, 36 aa, Homo sapiens
QQRLPWKSTTFPFFMGLSSLWESLEIPLLFTATSSL

SEQ ID NO: 5859 - protein, 1 aa, Homo sapiens
G

SEQ ID NO: 5860 - protein, 34 aa, Homo sapiens
  SITE (8): Xaa equals any of the naturally occurring L-amino acids
  SITE (9): Xaa equals any of the naturally occurring L-amino acids
  SITE (10): Xaa equals any of the naturally occurring L-amino acids
LFSCCLFXXXVLKPCLGHPTGELGHHLALWWQWG

SEQ ID NO: 5861 - protein, 52 aa, Homo sapiens
LLLLLAVVGTRWLLPAAAAAYPPPDWSRWPWASSPPPPWLCPPAAPGSHRGR

SEQ ID NO: 5862 - protein, 57 aa, Homo sapiens
MIPMRKVNTSLWFSLCLLQLTLQIWKQYGRRQNRKTLWIQNLDVCLNCQQRMINHMM

SEQ ID NO: 5863 - protein, 47 aa, Homo sapiens [sequence omitted]

SEQ ID NO: 5864 - protein, 79 aa, Homo sapiens
MGLRPPQAQMPPPMPALGSSGPHPPVPPTHPNMEGLCLPRACLSGACRTLPETLRTAPRKSSLMPTKASRTVRRSSPRR

SEQ ID NO: 5865 - protein, 63 aa, Homo sapiens
MAFILLFYCLMTFLSLEQNSATVEPSSHEILHLLQNCFELLRTSTSQCTEGIPCQRYQNGLHI

SEQ ID NO: 5866 - protein, 168 aa, Homo sapiens
MSGLSGPPARRGPFPLALPAQHLKITDSAGHILYSKEDATKGKFAFTTEDYDMFEVCFESKGTGRIPDQLVILDMKHGVEAKNYEEIAKVEKLKPLEVELRRLEDLSESIVNDFAYMKKREEEMRDTNESTNTRVLYFSIFSMFCLIGLATWQVFYLRRFFKAKKLIE

SEQ ID NO: 5867 - protein, 35 aa, Homo sapiens
MYVCVWLIFTSKFLRFMLLCVSEVSFYLLLSSIHL

SEQ ID NO: 5868 - protein, 35 aa, Homo sapiens
MWCALGFWGRAWGSRGPWAAQPGEPQPRGWSCSGN

SEQ ID NO: 5869 - protein, 35 aa, Homo sapiens; identical to SEQ ID NO: 5868

SEQ ID NO: 5870 - protein, 35 aa, Homo sapiens; identical to SEQ ID NO: 5868

SEQ ID NO: 5871 - protein, 52 aa, Homo sapiens
MYRAVSLPGAMGWACPAVMAPCFLLLGAGSRTLPTIHAVAPRAEPLLVLWQP

SEQ ID NO: 5872 - protein, 15 aa, Homo sapiens
MPANVQMQLVDTKAG

SEQ ID NO: 5873 - protein, 18 aa, Homo sapiens
MSVTSAWCGVWIIYRIIK

SEQ ID NO: 5874 - protein, 215 aa, Homo sapiens
DAVLAWWLCLEWQHLHVQLAPSAYGCWHGGILWRCVTGVPPAPVVGGAQTALETPPCSAAPDGLRPHCCGAGCCLYVSQPWKDCQPLLPSQLAGHHHCLPLRLPVVPGLCCLPPALGVHVAAQLLKPIHVFFGAAILSLSIASVISGINEKLFFSLKNTTRPYHSLPSEAVFANSTGMLVVAFGLLVLYILLASSWKRPEPGILTDRQPLLHDGE

SEQ ID NO: 5875 - protein, 39 aa, Homo sapiens
MPARVCFCAAAQGGAAAAHCAAGTQEWGVAPAGRRVPRD

SEQ ID NO: 5876 - protein, 24 aa, Homo sapiens
MSQYCFLLAGVLSSLLTPATKADF

SEQ ID NO: 5877 - protein, 21 aa, Homo sapiens
ISRRCILFDNSFSYRLPLQTT

SEQ ID NO: 5878 - protein, 200 aa, Homo sapiens
MHSLVLLCPLCSDPCGVCVAPKHSHSQGQQPDSELHPPCLPHTLLSLFLALHRPPQPCHLPPLTDHLCSCVHSGCVFCRAFQAIRPESRIRKWMGPQKTNSVVFLCSFTQVTLCGIWLGTEPPFVNKDPQFMPGYIIIQCNEGSVTAFYSVLGYLGFLVLGSLAVAFLARNLPDAFNEAKFLTFSMLVSCSVWVAFLPSY

SEQ ID NO: 5879 - protein, 51 aa, Homo sapiens
MLCNLHFLYFWHFFANGTCNSTLQIARVVSSLTPSQNTAFIVVSLSRELGY

SEQ ID NO: 5880 - protein, 54 aa, Homo sapiens
DLHFTLACSVLFVWAYSSRRNLPEVPSVTNSALSMESCYCQTGGLRDMLFSATS

SEQ ID NO: 5881 - protein, 35 aa, Homo sapiens
MFVTPPRLTFNLFTLRSWFYVCDCLLSLLLSPSGR

SEQ ID NO: 5882 - protein, 54 aa, Homo sapiens
MSFYRLVHSNQDLNSLRGLLMEFVFLFHLFQSKAVFPSFSFPCCCLVEIQSSIQ

SEQ ID NO: 5883 - protein, 76 aa, Homo sapiens
  SITE (51): Xaa equals any of the naturally occurring L-amino acids
MPIPFPGEQVHLPFLSLLAHWHQTQLPSKGPLASRAQIQPFSQEPLGHLAXTQLTSQGPLACRVQVQLPSQGLLAH

SEQ ID NO: 5884 - protein, 38 aa, Homo sapiens
MIHSLLLLLLLLLLLLILLRISISRLTGTNTLVFNLIL

SEQ ID NO: 5885 - protein, 37 aa, Homo sapiens
MQEARQQITTVVLPTLAVVVLLIVVFVYVATRPTITE

SEQ ID NO: 5886 - protein, 21 aa, Homo sapiens
MTHYVFLLLFMVGRGDEGKSG

SEQ ID NO: 5887 - protein, 41 aa, Homo sapiens [sequence omitted]

SEQ ID NO: 5888 - protein, 53 aa, Homo sapiens
MSNLSLRYSSSKGSWGSLFPNIRIMQIFLLMVDAHCVYISQPFKHESEKSFSK

SEQ ID NO: 5889 - protein, 17 aa, Homo sapiens
MWLSREVLVLISISASG

SEQ ID NO: 5890 - protein, 20 aa, Homo sapiens
MNPCFFSVLVLLPELALQWK

SEQ ID NO: 5891 - protein, 30 aa, Homo sapiens
MLLCFMRIKIPALLCLWYLPLHILVMAWEV

SEQ ID NO: 5892 - protein, 33 aa, Homo sapiens
MPLLLRWVSWLQVWKPRPPLSRRRKTSQLKPRS

SEQ ID NO: 5893 - protein, 233 aa, Homo sapiens
EILERPAQLANARETPHSPGVEDAPIAKVGVLAASMEAKASSQQEKEDKPAETKKLRIAWPPPTELGSSGSALEEGIKMSKPKWPPEDEISKPEVPEDVDLDLKKLRRSSSLKERSRPFTVAASFQSTSVKSPKTVSPPIRKGWSMSEQSEESVGGRVAERKQVENAKASKKNGNVGKTTWQNKESKGETGKRSKEGHSLEMENENLVENGADSDEDDNSFLKQQSPPRNPSL

SEQ ID NO: 5894 - protein, 49 aa, Homo sapiens
MHLFICTLWNIFCNKPVSWSSVSCSNKFIKPKEGVVGIPIYRRLVRSTS

SEQ ID NO: 5895 - protein, 20 aa, Homo sapiens
MILSTNLFTDLFILFLVLHS

SEQ ID NO: 5896 - protein, 12 aa, Homo sapiens
MAHPNRILLVPW

SEQ ID NO: 5897 - protein, 35 aa, Homo sapiens
MTKIVNTSLFLASVTIIVSATSGVEQPSTQRSLAF

SEQ ID NO: 5898 - protein, 66 aa, Homo sapiens [sequence omitted]

SEQ ID NO: 5899 - protein, 30 aa, Homo sapiens
MLSSVMLLSVLQVHLHLRAELHLLPLPLQR

SEQ ID NO: 5900 - protein, 29 aa, Homo sapiens
VNLDHLVKVVFARFLHYKVNIFPFPYYFL

SEQ ID NO: 5901 - protein, 38 aa, Homo sapiens
MCEARQLLVLQLLCGKQKPFCSVPQPAFVSRIEELFHK

SEQ ID NO: 5902 - protein, 17 aa, Homo sapiens
MKIRKRRNWASWRISVV

SEQ ID NO: 5903 - protein, 24 aa, Homo sapiens
  SITE (21): Xaa equals any of the naturally occurring L-amino acids
MVIIFILYILCIPVIKCRVLXSII

SEQ ID NO: 5904 - protein, 6 aa, Homo sapiens
IVLWLQ

SEQ ID NO: 5905 - protein, 41 aa, Homo sapiens
MEISAVTLGLLIRSVWGGAQESAFLIRSPAPLPHYSSAKRS

SEQ ID NO: 5906 - protein, 29 aa, Homo sapiens
MAVGLVVFFTTFLTPAAYVLGNLKQFRRN

SEQ ID NO: 5907 - protein, 11 aa, Homo sapiens
MGKRHRGKRMV

SEQ ID NO: 5908 - protein, 24 aa, Homo sapiens
MKEELWSVFRWVIILLQCRILMLP

SEQ ID NO: 5909 - protein, 40 aa, Homo sapiens
MIVLGWMFFVGLVCYMGTFPELMEPCGRDINIPQEGLQWK

SEQ ID NO: 5910 - protein, 17 aa, Homo sapiens
  SITE (12): Xaa equals any of the naturally occurring L-amino acids
MLSGWLFWLLWXSCISR

SEQ ID NO: 5911 - protein, 37 aa, Homo sapiens
MFLAVLLLILMLFLILVYHQVYISHGEKKIGLMYQGP

SEQ ID NO: 5912 - protein, 33 aa, Homo sapiens [sequence omitted]

SEQ ID NO: 5913 - protein, 44 aa, Homo sapiens
MFFGLLLMILFTLCQILSCRLFYNSTFKKNVYANLLSIFMSIFI

SEQ ID NO: 5914 - protein, 31 aa, Homo sapiens
MFCVVVLSLEATGYGRFTFTGGPLMTTAPST

SEQ ID NO: 5915 - protein, 35 aa, Homo sapiens
MSWCLDLRTTQRTLTIPALVHTTQRRSHRQKLPGQ

SEQ ID NO: 5916 - protein, 322 aa, Homo sapiens
MEASAAAVFSHFIMKFPWQWAFLLGFVLGAVSPAVVVPYMMVLQENGYGVEEGIPTLLMAASSMDDILAITGFNTCLSIVFSSGGILNNAIASIRNVCISLLAGIVLGFFVRYFPSEDQKKLTLKRGFLVLTMCVSAVLGSQRIGLHGSGGLCTLVLSFIAGTKWSQEKMKVQKIITTVWDIFQPLLFGLVGAEVSVSSLESNIVGISVATLSLALCVRILTTYLLMCFAGFSFKEKIFIALAWMPKATVQAVLGPLALETARVSAPHLEPYAKDVMTVAFLAILITAPNGALLMGILGPKMLTRHYDPSKIKLQLSTLEHH

SEQ ID NO: 5917 - protein, 32 aa, Homo sapiens
MNFKFPCATTVFILTTLKPVVSSFCYCEVDTQ

SEQ ID NO: 5918 - protein, 21 aa, Homo sapiens
CDIAFFLFLLLFSAAADLEMK

SEQ ID NO: 5919 - protein, 142 aa, Homo sapiens
  SITE (111): Xaa equals any of the naturally occurring L-amino acids
MHQLLQLQRQEPCRLLSPSPQPGLHHLCFQQIELLLLLLHLQWGLGLLRQLHHKRLAQLLLHRRRDHPIPPIQDILGIAKCPCPWAIILMRMASIICHIHQCITRVLDRLXTRDPSSLHTPSLSPHSSLTIHSSNMSAQQLS

SEQ ID NO: 5920 - protein, 10 aa, Homo sapiens
MRFFCVIFVF

SEQ ID NO: 5921 - protein, 23 aa, Homo sapiens
HLHVSLLSFPPLFIHSANLSANQ

SEQ ID NO: 5922 - protein, 23 aa, Homo sapiens
MHVFLTFIGLSGTFCELPVTFLC

SEQ ID NO: 5923 - protein, 52 aa, Homo sapiens
MLREFWLLFLFCLGREHMSKCDKCEQIIWRGEEIQERGGPVFSLFWKNNHFS

SEQ ID NO: 5924 - protein, 34 aa, Homo sapiens
MKNLTHFFLSLSSLSSFLFLVSSSFSRRAGPGQG

SEQ ID NO: 5925 - protein, 42 aa, Homo sapiens
MMTITFCVYLPILSLWHWLVMRNGHTTIQMEVQLGFPKSPLM

SEQ ID NO: 5926 - protein, 16 aa, Homo sapiens
MNGLCILTHLILSTIL

SEQ ID NO: 5927 - protein, 34 aa, Homo sapiens
MRDLVLKIVFFYNFLGITCFTVAGTNLINPVFEQ

SEQ ID NO: 5928 - protein, 73 aa, Homo sapiens
  SITE (13): Xaa equals any of the naturally occurring L-amino acids
  SITE (36): Xaa equals any of the naturally occurring L-amino acids
  SITE (40): Xaa equals any of the naturally occurring L-amino acids
  SITE (51): Xaa equals any of the naturally occurring L-amino acids
  SITE (62): Xaa equals any of the naturally occurring L-amino acids
MISFIRYQLFLHXIKIILHWLILIFCWSSHFPGSHXPHSXPAKVKVGNLWXWKQSQVTWPTXEMEPMALPMHL

SEQ ID NO: 5929 - protein, 16 aa, Homo sapiens
MRGKHVCLLLLLLGRF

SEQ ID NO: 5930 - protein, 28 aa, Homo sapiens
MMELVLMASEVSGQSAQILASFLALVSL

SEQ ID NO: 5931 - protein, 15 aa, Homo sapiens
MHRAFLVTNRRWALR

SEQ ID NO: 5932 - protein, 22 aa, Homo sapiens
MSLILFLLINIRWDLSLVLSQR

SEQ ID NO: 5933 - protein, 39 aa, Homo sapiens
MKKIVFPFPGSFNSLFLRLFFSSLLSYSIQTSPCLILKR

SEQ ID NO: 5934 - protein, 44 aa, Homo sapiens
MRRQPLALRSLLCTLPLVPGVAIYLVGPRPLSSRKASVLSSALC

SEQ ID NO: 5935 - protein, 38 aa, Homo sapiens
MPAATWHPLSCLLSFLVCAVVGCISPFLHCNKGIPEIG

SEQ ID NO: 5936 - protein, 27 aa, Homo sapiens
MFPMLFCVLGHLMHFSRASCFPSVRIP

SEQ ID NO: 5937 - protein, 20 aa, Homo sapiens
GTYPLFLECLSLSCLLSGPQ

SEQ ID NO: 5938 - protein, 32 aa, Homo sapiens
MFLLFLRSLPYILCIVKPFLKSNDLGKPTLVC

SEQ ID NO: 5939 - protein, 14 aa, Homo sapiens
MFEGPGRAVACLCL

SEQ ID NO: 5940 - protein, 20 aa, Homo sapiens
MCWLAAKNLLECKYASLHHL

SEQ ID NO: 5941 - protein, 39 aa, Homo sapiens
MWLKIGFLSIFSLVLFYKTSLSTYHVPYSLVGPEDKEMY

SEQ ID NO: 5942 - protein, 12 aa, Homo sapiens
MAASMHQCFPLT

SEQ ID NO: 5943 - protein, 37 aa, Homo sapiens
MMCFLGAGCIEFKTWTMAWIAWVQILPLLYHFRQAGP

SEQ ID NO: 5944 - protein, 23 aa, Homo sapiens
MEVGVSLLCRIWDWANVCVASLN

SEQ ID NO: 5945 - protein, 7 aa, Homo sapiens
SFKLLIT

SEQ ID NO: 5946 - protein, 72 aa, Homo sapiens
  SITE (43): Xaa equals any of the naturally occurring L-amino acids
MPACGSLPPRAHQPWCPAGLLQSLVLEQLLEFSAASSPQPSRXSELLPGQHLLGPVLRPHGAGLMWELILAG

SEQ ID NO: 5947 - protein, 21 aa, Homo sapiens
MAFLKGWLPFCWSQRSIHSYL

SEQ ID NO: 5948 - protein, 80 aa, Homo sapiens
IGHIMLLVFPKCLVIFYCSFNYRLHFFVCLFLLSSQMLPNMAASNPEFNPGTILQTAQFSSEWAICIPTHQSYYLKNYIF

SEQ ID NO: 5949 - protein, 67 aa, Homo sapiens
PFNTILLFCLYFLLTVHIINYVIYFFIAGSFNPVLCLGDAPIQLHVTVACSFPVSCSVPSCEFITVY

SEQ ID NO: 5950 - protein, 43 aa, Homo sapiens
MCVCVYIYIYVYIYVYICIYVYINQNEKPFWILRATKFREVIS

SEQ ID NO: 5951 - protein, 45 aa, Homo sapiens
MFYNFLLIFIFLVCQSSPLTSHIYLCCILAWCLAWRRHWNIGKNE

SEQ ID NO: 5952 - protein, 23 aa, Homo sapiens
  SITE (4): Xaa equals any of the naturally occurring L-amino acids
  SITE (15): Xaa equals any of the naturally occurring L-amino acids
GPGXEVIESWEPSLXLCCSGGGE

SEQ ID NO: 5953 - protein, 92 aa, Homo sapiens
MPFQFPKKARLVPLLGLCLEYSQTLSRAPAWMSVSRGPPHSTWIKAGLPGALHHTPFPPSACLARPARSFHDGRAWPLLHAMQAWPLPTTGP

SEQ ID NO: 5954 - protein, 27 aa, Homo sapiens
MFYWQRLGLALLASVLGFFLCTADWLS

SEQ ID NO: 5955 - protein, 33 aa, Homo sapiens
MLTTYWVLCSLPIGYCAHYLLGTLVTASYNIPM

SEQ ID NO: 5956 - protein, 190 aa, Homo sapiens
IALRLTLLPASSAALHLRRSPVCLQLLPRQLIKQPVRLMFTKVKLEQVLKGPEEALVTCRQVLRLWQTLYSFSQLGGLEKDGSFGEGLTMKKQSGMHLTLPDAHDADSGSRRASSIAASRLEEAMSELTMPSSVLKQGPMQLWTTLEQIWLQAAELFMEQQHLKEAGFCTGGGGPLPHFSLSTLYAGPAG

SEQ ID NO: 5957 - protein, 194 aa, Homo sapiens
MCGSCWAFSVTGNVEGQWFLNQGTLLSLSEQELLDCDKMDKACMGGLPSNAYSAIKNLGGLETEDDYSYQGHMQSCNFSAEKAKVYINDSVELSQNEQKLAAWLAKRGPISVAINAFGMQFYRHGISRPLRPLCSPWLIDHAVLLVGYGNRSDVPFWAIKNSWGTDWGEKGYYYLHRGSGACGVNTMASSAVVD

SEQ ID NO: 5958 - protein, 232 aa, Homo sapiens [sequence omitted]

SEQ ID NO: 5959 - protein, 75 aa, Homo sapiens
WVSLCTLASVLLGAGAVSHARACEGTTGVNESPMMTWGEVENTPLRVEGSETPYVDRTPGPAFKILEPGRRNGWV

SEQ ID NO: 5960 - protein, 49 aa, Homo sapiens
MSMFWLKKLLESGLFCAMCSPRASTKKGFWCRPKTTIIIIDYSSPRQCL

SEQ ID NO: 5961 - protein, 93 aa, Homo sapiens
MLCAAAIATVASSCREGLVPCAAQQLLEVKLEQVLLLPQPHVPGKGAASSPSGSSGPTCGSCCRPPLPRAPPVGPSYTRCSPGRCTSRPRSRS

SEQ ID NO: 5962 - protein, 176 aa, Homo sapiens
MAWSSPAGLLRFLFRQLLLATQGGPKGKEQSVLAPQPGPGPPFTLKPRVFLHLYISNTPKGAARDIYLPPTSEGGLPHSPPMRLQAHVLGQLKPVCYVAPSLCDTHVGCLSASDKLARWAVLGLGGALLAHLVSPLYSTSLILVPPWGLPPVSARPPFSGPFTRRPGLWGSPTSWP

SEQ ID NO: 5963 - protein, 8 aa, Homo sapiens
MSEGLLCL

SEQ ID NO: 5964 - protein, 170 aa, Homo sapiens
MILTMLLMLKLCTEVRVANELNARRRSFTDFDPHHFWQWSSFSDYVQCVLAFTGVAGYITYLSIDSALFVETLGFLAVLTEAMLGVPQLYRNHRHQSTEGMSIKMVLMWTSGDAFKTAYFLLKGAPLQFSVCGLLQVLVDLAILGQAYAFARHPQKPAPHAVHPTGTKAL

SEQ ID NO: 5965 - protein, 13 aa, Homo sapiens
MASLCSCLTALMC

SEQ ID NO: 5966 - protein, 13 aa, Homo sapiens
MASLCSCLTALMC

SEQ ID NO: 5967 - protein, 152 aa, Homo sapiens
MQGTPGGGTRPGPSPVDRRTLLVFSFILAAALGQMNFTGDQVLRVLAKDEKQLSLLGDLEGLKPQKVDFWRGPARPSLPVDMRVPFSELKDIKAYLESHGLAYSIMIKDIQVLLDEERQAMAKSRRLERSTNSFSYSSYHTLERYIAGLTTL

SEQ ID NO: 5968 - protein, 75 aa, Homo sapiens [sequence omitted]

SEQ ID NO: 5969 - protein, 35 aa, Homo sapiens [sequence omitted]

SEQ ID NO: 5970 - protein, 314 aa, Homo sapiens
MVKLLVAKILCMVGVFFFMLLGSLLPVKIIETDFEKAHRSKKILSLCNTFGGGVFLATCFNALLPAVREKLQKVLSLGHISTDYPLAETILLLGFFMTVFLEQLILTFRKEKPSFIDLETFNAGSDVGSDSEYESPFMGGARGHALYVEPHGHGPSLSVQGLSRASPVRLLSLAFALSAHSVFEGLALGLQEEGEKVVSLFVGVAVHETLVAVALGISMARSAMPLRDAAKLAVTVSAMIPLGIGLGLGIESAQGVPGSVASVLLQGLAGGTFLFITFLEILAKELEEKSDRLLKVLFLVLGYTVLAGMVFLKW

SEQ ID NO: 5971 - protein, 174 aa, Homo sapiens
MTFLLMLLLIFFYIFAVTGVYVFSEYTRSPRQDLEYHVFFSDLPNSLVTVFILFTLDHWYALLQDVWKVPEVSRIFSSIYFILWLLLGSIIFRSIIVAMMVTNFQNIRKELNEEMARREVQLKADMFKRQIIQRRKNMSHEALTSSHSKIEDRSFGLGDSCARKSARANGNGSG

SEQ ID NO: 5972 - protein, 170 aa, Homo sapiens
MPIPASPLHPPLPSLLLYLLLELAGVTHVFHVQQTEMSQTVSTGESIILSCSVPNTLPNGPVLWFKGTGPNRKLIYNFKQGNFPRVKEIGDTTKPGNTDFSTRIREISLADAGTYYCVKFIKGRAIKEYQSGRGTQVFVTVSYSSRSQKSEICISGLKSRHQQNCSFWRF

SEQ ID NO: 5973 - protein, 85 aa, Homo sapiens
  SITE (35): Xaa equals any of the naturally occurring L-amino acids
  SITE (74): Xaa equals any of the naturally occurring L-amino acids
  SITE (76): Xaa equals any of the naturally occurring L-amino acids
  SITE (77): Xaa equals any of the naturally occurring L-amino acids
  SITE (83): Xaa equals any of the naturally occurring L-amino acids
MLWTTLTGVSLALFPVAQAPTALVALAVAYGFTSXALAPLAFSVLPELIGTRRIYCGLGLLQMIESIGGLLGPXLXXKWNGVXRG

SEQ ID NO: 5974 - protein, 303 aa, Homo sapiens
MAWCGRLLLSPSPTASPAARLLRTLAETPPADTFLLGNWCWMCQRLWPWPANQPLPGGLLPRPLSLAPSSSSSCCSPPCSQDGRMAAQGAPRFLLTFDFDETIVDENSDDSIVRAAPGQRLPESLRATYREGFYNEYMQRVFKYLGEQGVRPRDLSAIYEAIPLSPGMSDLLQFVAKQGACFEVILISDANTFGVESSLRAAGHHSLFRRILSNPSGPDARGLPAPRLPHAPLSFRRPRRPSPARSAPAWCPGKRCRCAPPPATGAEVVLSLAACRGVPGPTAEGAGKGDSAKTALLKKKKKK

SEQ ID NO: 5975 - protein, 187 aa, Homo sapiens [sequence omitted]

SEQ ID NO: 5976 - protein, 187 aa, Homo sapiens [sequence omitted]

SEQ ID NO: 5977 - protein, 187 aa, Homo sapiens [sequence omitted]

SEQ ID NO: 5978 - protein, 187 aa, Homo sapiens [sequence omitted]

SEQ ID NO: 5979 - protein, 314 aa, Homo sapiens
MGARGALLLALLLARAGLRKPESQEAAPLSGPCGRRVITSRIVGGEDAELGRWPWQGSLRLWDSHVCGVSLLSHRWALTAAHCFETYSDLSDPSGWMVQFGQLTSMPSFWSLQAYYTRYFVSNIYLSPRYLGNSPYDIALVKLSAPVTYTKHIQPICLQASTFEFENRTDCWVTGWGYIKEDEALPSPHTLQEVQVAIINNSMCNHLFLKYSFRKDIFGDMVCAGNAQGGKDACFGDSGGPLACNKNGLWYQIGVVSWGVGCGRPNRPGVYTNISHHFEWIQKLMAQSGMSQPDPSWPLLFFPLLWALPLLGPV

SEQ ID NO: 5980 - protein, 240 aa, Homo sapiens
MGNCQAGHNLHLCLAHHPPLVCATLILLLLGLSGLGLGSFLLTHRTGLRSPDIPQDWVSFLRSFGQLTLCPRNGTVTGKWRGSHVVGLLTTLNFGDGPDRNKTRTFQATVLGSQMGLKGSSAGQLVLITARVTTERTAGTCLYFSAVPGILPSSQPPISCSEEGAGNATLSPRMGEECVSVWSHEGLVLTKLLTSEELALCGSRLLVLGSFLLLFCGLLCCVTAMCFHPRRESHWSRTRL

SEQ ID NO: 5981 - protein, 31 aa, Homo sapiens
MCICVLILICIFTDFIISYVLNFYLWRKHTT

SEQ ID NO: 5982 - protein, 23 aa, Homo sapiens
MHLIIFFIILCTNSACNNQFTWK

SEQ ID NO: 5983 - protein, 51 aa, Homo sapiens
MTLLLWKFNLFIVFWALWVVRAGLWVLGNSSGSQHSKAKLTSSSHTLQEKH

SEQ ID NO: 5984 - protein, 51 aa, Homo sapiens; identical to SEQ ID NO: 5983

SEQ ID NO: 5985 - protein, 51 aa, Homo sapiens; identical to SEQ ID NO: 5983

SEQ ID NO: 5986 - protein, 51 aa, Homo sapiens; identical to SEQ ID NO: 5983

SEQ ID NO: 5987 - protein, 28 aa, Homo sapiens
HEPRVPWSDKLGNAACCTFLSKIHVQRI

SEQ ID NO: 5988 - protein, 15 aa, Homo sapiens
MREVLLFFLFYTRGH

SEQ ID NO: 5989 - protein, 51 aa, Homo sapiens
MPSEAFVIVIQPLIVSTSTDHFVTTSCGSYYSQTVSLKRKPLFYKSTLQVF

SEQ ID NO: 5990 - protein, 34 aa, Homo sapiens
MLMICLLSGRAFAYFFSNYFTSTLILLSQFSYQH

SEQ ID NO: 5991 - protein, 118 aa, Homo sapiens
VARAVCLVFALIVFSCIYGEGYSNAHESKQMYCVFNRNEDACRYGSAIGVLAFLASAFFLVVDAYFPQISNATDRKYLVIGDLLFSALWTFLWFVGFCFLTNQWAVTNPKTCWWGPTL

SEQ ID NO: 5992 - protein, 4 aa, Homo sapiens
CTLL

SEQ ID NO: 5993 - protein, 36 aa, Homo sapiens
HKFSECTVYFGFRRAVYLSLLLLASSALQLPLERAF

SEQ ID NO: 5994 - protein, 62 aa, Homo sapiens
KCFHLLWSLVTSAQRPSDGYFFEAFIYIILFCTMFFLNVQILYSSEKNTVFVDNHSYYTVLR

SEQ ID NO: 5995 - protein, 14 aa, Homo sapiens
MSTFLWDIQTTYCF

SEQ ID NO: 5996 - protein, 16 aa, Homo sapiens
LTLPYLFLGGGWRGGV

SEQ ID NO: 5997 - protein, 31 aa, Homo sapiens
MVCWLLPLWVTVLSFPVGRDVAALLIFTSSY

SEQ ID NO: 5998 - protein, 19 aa, Homo sapiens
LSLLHPLSVPPGSLEQDGV

SEQ ID NO: 5999 - protein, 6 aa, Homo sapiens
GDVWLL

SEQ ID NO: 6000 - protein, 24 aa, Homo sapiens
MCWPWGGPPLPSLPTSLRWMSLCY

SEQ ID NO: 6001 - protein, 24 aa, Homo sapiens
MCWPWGGPPLPSLPTSLRWMSLCY

SEQ ID NO: 6002 - protein, 46 aa, Homo sapiens
NTFWHGSSCLSICQFSCEDSVYRLYTAHVERGQWVLYLKYVLPFCC

SEQ ID NO: 6003 - protein, 43 aa, Homo sapiens
MLLPILLYSFLYPTIVSRNYFKLIRSCMLFLKKKKKKERKISV

SEQ ID NO: 6004 - protein, 23 aa, Homo sapiens
FNSLLLLMLPCYLCCHYPLFFPS

SEQ ID NO: 6005 - protein, 40 aa, Homo sapiens
MSRGCLSLLLIIIHFLGSHCPHLFSLELRFIFILQTGKTE

SEQ ID NO: 6006 - protein, 14 aa, Homo sapiens
FCTTFNFLFVFCLR

SEQ ID NO: 6007 - protein, 37 aa, Homo sapiens
MPSQTARPGLQLFTTPCILQLLWCFAPPVVGNFCTTL

SEQ ID NO: 6008 - protein, 15 aa, Homo sapiens
MAGSHAVWAWHCPGL

SEQ ID NO: 6009 - protein, 31 aa, Homo sapiens
MLSNKIFPVYFQLVKSFIFVVGCCLFTLGGN

SEQ ID NO: 6010 - protein, 71 aa, Homo sapiens
MFLPLSVDYHYRILGFFLSFCSALHPLVVCFFCWALLISLPLVSSPTAYVLKCVFLKYCFPLVTFLLEDFQ

SEQ ID NO: 6011 - protein, 34 aa, Homo sapiens
MSPVLWWSWNLILFMNFQSLEKSMVWIWEVGLAD

SEQ ID NO: 6012 - protein, 37 aa, Homo sapiens
MGLLLFGGIFLLTVIMKVITMRDSDLFLKFGGGISPH

SEQ ID NO: 6013 - protein, 14 aa, Homo sapiens
MFLYRNKFIPVTLW

SEQ ID NO: 6014 - protein, 36 aa, Homo sapiens
MYWVIAGTTFTSLLCLIQFISLVCALLKYLCLNFCI

SEQ ID NO: 6015 - protein, 35 aa, Homo sapiens; identical to SEQ ID NO: 5601

SEQ ID NO: 6016 - protein, 23 aa, Homo sapiens
HLPICFLFSASPGASGHFLLPFL

SEQ ID NO: 6017 - protein, 30 aa, Homo sapiens
MSIFVQVFVWKYVFVSLRYIGKELQNQLCA

SEQ ID NO: 6018 - protein, 47 aa, Homo sapiens
MKCNSCSLGPFHSLFLGPACGLVGTLESRHSRGRGRAAFLAGHSRAL

SEQ ID NO: 6019 - protein, 134 aa, Homo sapiens
MGPEDLGERDNSFHCIFVTATFLETFFWKRLPWLLVQMGVSQGAGLCPWNLSLATCFRDWSGGTEGLGFSLWGLCCLWGYTEGKAGQWGLCCGEWQLAQSRDKILELGRSPAFGVAFGAPGTAGRGAQYLLSSA

SEQ ID NO: 6020 - protein, 48 aa, Homo sapiens [sequence omitted]

SEQ ID NO: 6021 - protein, 33 aa, Homo sapiens
MCLIFSICFLCIHIGFCFVFNLLIMGLNFQIYF

SEQ ID NO: 6022 - protein, 53 aa, Homo sapiens
KEAGTWLVFWIRLDFSTGQDSLFLGRAECHVDSSDRITAVPLSLGFESLGLGH

SEQ ID NO: 6023 - protein, 33 aa, Homo sapiens
MCPYCPTSCALLVMCFLLISLSCLVASSLLLKV

SEQ ID NO: 6024 - protein, 33 aa, Homo sapiens
MCLNLTVISALLWWSGTKVAVAPRYAYTVKNNL

SEQ ID NO: 6025 - protein, 53 aa, Homo sapiens
MKGHFGKGLDELVAFNLCLHLPLSATLGRPGGASEDHRPTGLAIMTPLEVSSS

SEQ ID NO: 6026 - protein, 40 aa, Homo sapiens
EVKCIYIFLWLLMLLVLHLRIHCQIQGHEDLLLCFLLRIL

SEQ ID NO: 6027 - protein, 60 aa, Homo sapiens
  SITE (10): Xaa equals any of the naturally occurring L-amino acids
  SITE (42): Xaa equals any of the naturally occurring L-amino acids
MFFPCLPTLXLRILHSGWVGLFLLISSRAPSSSLAWKHGPGXLWWPRRPLRSCTGLASCG

SEQ ID NO: 6028 - protein, 31 aa, Homo sapiens
MMKMKMKMQWMLMVVMMMIKGVMMNTVMMMT

SEQ ID NO: 6029 - protein, 47 aa, Homo sapiens
MRIYLMLVLVYCELNITALEPKRRCLRHGLLLLCSFQGAPVIPAVST

SEQ ID NO: 6030 - protein, 13 aa, Homo sapiens
MASGLNSGAFGVV

SEQ ID NO: 6031 - protein, 17 aa, Homo sapiens
MLLLCVFLFVFMVFGAI

SEQ ID NO: 6032 - protein, 50 aa, Homo sapiens
MGAWPPCPARSSRRRSLAAWCVACCWSSRWAAPSSSTHCARRNTGPSRPR

SEQ ID NO: 6033 - protein, 49 aa, Homo sapiens
MLYLPALWFHHVQQSQGCIAVNFWYDMEYDLKYSYFQLLDSLTKASGLD

SEQ ID NO: 6034 - protein, 21 aa, Homo sapiens
MTAEAMFSFLIFICLLILFSK

SEQ ID NO: 6035 - protein, 35 aa, Homo sapiens
MFFEIHPLLTFCTICFIICTLCVGGLCVQYAIGFS

SEQ ID NO: 6036 - protein, 45 aa, Homo sapiens
MLLLSFHSLLYFGDLFILLCVHLILQCVSTTFNLFTYRTMQEFLW

SEQ ID NO: 6037 - protein, 15 aa, Homo sapiens
MCLCNDCLFWFTMFL

SEQ ID NO: 6038 - protein, 37 aa, Homo sapiens
MITDVQLAIFANMLGVSLFLLVVLYHYVAVNNPKKQE

SEQ ID NO: 6039 - protein, 99 aa, Homo sapiens
FHPFTFYVFVCLCLKCIYHRQHIVGSCFFIQFDSLCLLIDVWVHLHLMLLSVWLGLSLSSCYLFCICSMYALFPFLPFSAFFWITVFFNDSIVFSSLIY

SEQ ID NO: 6040 - protein, 234 aa, Homo sapiens
KLLYTTLRHPKCFLQRLSLENCHLTEANCKDLAAVLVVSRELTHLCLAKNPIGNTGVKFLCEGLRYPECKLQTLVLWNCDITSDGCCDLTKLLQEKSSLLCLDLGLNHIGVKGMKFLCEALRKPLCNLRCLWLWGCSIPPFSCEDLCSALSCNQSLVTLDLGQNPLGSSGVKMLFETLTCSSGTLRTLRLKIDDFNDELNKLLEEIEEKNPQLIIDTEKHHPWEERPSSHDFMI

SEQ ID NO: 6041 - protein, 244 aa, Homo sapiens
MMRTQCLLGLRTFVAFAAKLWSFFIYLLRRQIRTVIQYQTVRYDILPLSPVSRNRLAQVKRKILVLDLDETLIHSHHDGVLRPTVRPGTPPDFILKVVIDKHPVRFFVHKRPHVDFFLEVVSQWYELVVFTASMEIYGSAVADKLDNSRSILKRRYYRQHCTLELGSYIKDLSVVHSDLSSIVILDNSPGAYRSHPDNAIPIKSWFSDPSDTALLNLLPMLDALRFTADVRSVLSRNLHQHRLW

SEQ ID NO: 6042 - protein, 68 aa, Homo sapiens
MFATQGHSCPQGLSDFLLLALLMSLHHPPSPLLQRGNNKGTEDSCIWEKSCQIQKFAIMYFYVFMPCD

SEQ ID NO: 6043 - protein, 57 aa, Homo sapiens
EWWPFCPPPIPVSTFIKLLCCLHFLTTSLAAYISFFPSGVSPSLLTGSSPLHLRSGL

SEQ ID NO: 6044 - protein, 7 aa, Homo sapiens
IIGTFYQ

SEQ ID NO: 6045 - protein, 40 aa, Homo sapiens
MTGHSPSPIYLVLAWGVTAAATTLTGPVLSRYNLATPWNS

SEQ ID NO: 6046 - protein, 28 aa, Homo sapiens
MPNCLHIILGSFLLIIFTVCMFIGKGLL

SEQ ID NO: 6047 - protein, 27 aa, Homo sapiens
MLLLFWTFALDVVPTEWLAGRREILFR

SEQ ID NO: 6048 - protein, 47 aa, Homo sapiens
MYSKSSANISQGMLDILLWIDLAHDDLLGSPSPVILRSHAHSGILTV

SEQ ID NO: 6049 - protein, 32 aa, Homo sapiens
MFSRFIHLFGVLNLMWLSLVSCQCLFAFCFQR

SEQ ID NO: 6050 - protein, 76 aa, Homo sapiens [sequence omitted]

SEQ ID NO: 6051 - protein, 28 aa, Homo sapiens
MGRRIRWHSWMTLWIFLMKSALVWMIWL

SEQ ID NO: 6052 - protein, 20 aa, Homo sapiens
MFQAPCFLMYLVFFPHFERI

SEQ ID NO: 6053 - protein, 54 aa, Homo sapiens
MVRAQMSPQSPALAEWILLLALLLRLRWRQLWNKMFLAPKKKKKKKKKKKKKKK

SEQ ID NO: 6054 - protein, 16 aa, Homo sapiens
MSSWLLVYIGWLLSSL

SEQ ID NO: 6055 - protein, 318 aa, Homo sapiens
  SITE (192): Xaa equals any of the naturally occurring L-amino acids
MKAPLATLALLWYHTVVRPFFALDGSDNKAGLDEAKEILLKKEAAYPNSSLFMFFKGRIQRLECQINSALTSFHTALELAVDQREIQHVCLYEIGWCSMIELNFKDAFDSFERLKNESRWSQCYYAYLTAVCQGATGDVDGAQIVFKEVQKLFKRKNNQIEQFSVKKAERFRKQTPTKALCVLASIEVLYLXKALPNCSFPNLQRMSQACHEVDDSSVVGLKYLLLGAIHKCLGNSEDAVQYFQRAVKDELCRQNNLYVQPYACYELGCLLLDKPETVGRGRALLLQAKEDFSGYDFENRLHVRIHAALASLRELVPQ

SEQ ID NO: 6056 - protein, 24 aa, Homo sapiens
MFLVLVICYYLLLSSRGPDWPWHN

SEQ ID NO: 6057 - protein, 33 aa, Homo sapiens
MLRNTALWYHLLTDLLLIYLIGRVVSISFYFYH

SEQ ID NO: 6058 - protein, 57 aa, Homo sapiens
EPLADFCFLYRLLCRLTSRLYPCLCERGCVVGTGTILTQKLATSHCLAQMWIIVITN

SEQ ID NO: 6059 - protein, 32 aa, Homo sapiens
MSFSCACAGSASVFFLFCVAQPLPGTRQPWQE

SEQ ID NO: 6060 - protein, 46 aa, Homo sapiens
MTKKPQSIACSTLSLWCVCLASIIHEVNLEGQTGNNMSWYILPGNT

SEQ ID NO: 6061 - protein, 116 aa, Homo sapiens
  SITE (14): Xaa equals any of the naturally occurring L-amino acids
MFSVFFLLLLLFLXFILLLLLPPSSSVLLLFLFLFLLLFSFSSFFSFFFFLGQGLILLPRLEYTGTIIARCRLKLLTSSNPPFLASQSAGIRGMSHCTWPVFHYSYICYGNVTSDL

SEQ ID NO: 6062 - protein, 39 aa, Homo sapiens
  SITE (22): Xaa equals any of the naturally occurring L-amino acids
MCIEACFTPICSFCCVSFSGLXHSLFLLFIKNRISKDYE

SEQ ID NO: 6063 - protein, 30 aa, Homo sapiens
MSEVKILRFVLITFVFCKHSDPPISALSLT

SEQ ID NO: 6064 - protein, 32 aa, Homo sapiens
METAICLVLFPQLLLLVVHISSSALAHGTLIN

SEQ ID NO: 6065 - protein, 50 aa, Homo sapiens
MQWPRAEGLIHGLFQGVLLAGWTWECAVGQGAAGVLPPPSTNLAPWGPAS

SEQ ID NO: 6066 - protein, 41 aa, Homo sapiens
DPSFRSLLPLFLLFRGCVITETWNAEKCYHRNLECRKIFAF

SEQ ID NO: 6067 - protein, 26 aa, Homo sapiens
MLLGVFLTGLFLPILMAIFLLKCNSF

SEQ ID NO: 6068 - protein, 16 aa, Homo sapiens
MILIVPYILKVVWFYF

SEQ ID NO: 6069 - protein, 34 aa, Homo sapiens
MFMFLLLVGLCLFPLNITKKNKKKSCINICCISK

SEQ ID NO: 6070 - protein, 15 aa, Homo sapiens
NVCFSCLLKLFWGSQ

SEQ ID NO: 6071 - protein, 14 aa, Homo sapiens
AALWQSLLFCFVCF

SEQ ID NO: 6072 - protein, 64 aa, Homo sapiens
MVLLQTVVWLSSHVLWLPQNRAQAARGHLHVPLLAVPATSKLCHRLNSSFRGPGWHPGDLPLLF

SEQ ID NO: 6073 - protein, 42 aa, Homo sapiens
LWRLAVLKLICGFINTLLIIFPGEIFIKCRPAKAILKRRRRH

SEQ ID NO: 6074 - protein, 45 aa, Homo sapiens
MLFVLYMSLLSKAVSSMRTGTILINCVFLAPHTSAWNIATINKCL

SEQ ID NO: 6075 - protein, 27 aa, Homo sapiens
SYISDTRSHFLFLYFIHPFIQQIFAEH

SEQ ID NO: 6076 - protein, 31 aa, Homo sapiens
MLLHLCLSLPSSVWFLGVLLLSCVNTALQYH

SEQ ID NO: 6077 - protein, 56 aa, Homo sapiens
MARACVFQLSLWRKLPVGINLSPAILSLSLGCLGLGFLLLLERMTTDSGIRQRRQT

SEQ ID NO: 6078 - protein, 70 aa, Homo sapiens
MQSLPSASTFSASSACGAAMRPARGSAPSATRPLVPTTSIVSTSAEPETQGTLEHHGPWGLCPISSPPQV

SEQ ID NO: 6079 - protein, 34 aa, Homo sapiens
MASRVLAALIVASVVGLAELYVMVRAMEGELGEL

SEQ ID NO: 6080 - protein, 27 aa, Homo sapiens
MAFLGLTLCTLHLGIQASTVPLGLPSP

SEQ ID NO: 6081 - protein, 43 aa, Homo sapiens
MVVEELANIKLAPEIQTCVYCSGSMELVTMGKRQRLELCKVME

SEQ ID NO: 6082 - protein, 81 aa, Homo sapiens
MVARVWSLMRFLIKGSVPGGAVYLVYDQELLGPSDKSQAALQKAGEVVPPAMLPVQPVRVSADRPADTPAPSPSKDLLSHP

SEQ ID NO: 6083 - protein, 15 aa, Homo sapiens
MYILLFLLAIFLRLY

SEQ ID NO: 6084 - protein, 32 aa, Homo sapiens
MLPSTRVFTLRYCWSCQLSRDMISLFRQPCSF

SEQ ID NO: 6085 - protein, 32 aa, Homo sapiens
MAKSSGHNSLVAFVVVVVVLFFVCFETMSPKQ

SEQ ID NO: 6086 - protein, 4 aa, Homo sapiens
MVKP

SEQ ID NO: 6087 - protein, 31 aa, Homo sapiens
MPLVPLLLSCPPTWLARFGVSLPCSGIPVLA

SEQ ID NO: 6088 - protein, 83 aa, Homo sapiens
MYEQAAAGHGPISPFSLCVSLGIHPANQGRPGVWALGTNGAHILEWQILGDALPVPAGPVPPTQSSPQTWCNFTRAIPFPRLP

SEQ ID NO: 6089 - protein, 12 aa, Homo sapiens
WWGRVWPVNPDH

SEQ ID NO: 6090 - protein, 9 aa, Homo sapiens
MLLLVFLDC

SEQ ID NO: 6091 - protein, 73 aa, Homo sapiens
MNITRKLWSRTFNCSVPCSDTVPVIAVSVFILFLPVVFYLSSFLHSEQKKRKLILPKRLKSSTSFANIQENSN

SEQ ID NO: 6092 - protein, 9 aa, Homo sapiens
MKSPEYHYG

SEQ ID NO: 6093 - protein, 129 aa, Homo sapiens [sequence omitted]

SEQ ID NO: 6094 - protein, 61 aa, Homo sapiens
MCLLLLWLTTFQRTSGALRRGGLSSPAWAMRSPSVYSTQTPSPMMSTGTLRGLSGAMCNLS

SEQ ID NO: 6095 - protein, 12 aa, Homo sapiens
LASTANFWVVIT

SEQ ID NO: 6096 - protein, 46 aa, Homo sapiens
MAAGTFLYITFLEILPQELASSEQRILKVILLLAGFALSWPVFIQI

SEQ ID NO: 6097 - protein, 52 aa, Homo sapiens
MVTLSSLILEMWYCFWLNILVGRVSSRGFHLALTIKMTLISWVRKPIWELCQ

SEQ ID NO: 6098 - protein, 46 aa, Homo sapiens
MKSQCYSPSYFAFFCLVFFQITSASSQTLRGHVLCRTTLRDSSAYC

SEQ ID NO: 6099 - protein, 38 aa, Homo sapiens
MFTCTAGLSCLFQFCFTCGVFTDFKKECMHGVEQDTVS

SEQ ID NO: 6100 - protein, 55 aa, Homo sapiens
MPSEIIYLLSLLYTSVCLQQPPQPRWVCFCFLGWGAGTGGGRRAGFRSLLAEPFV

SEQ ID NO: 6101 - protein, 80 aa, Homo sapiens
  SITE (80): Xaa equals any of the naturally occurring L-amino acids
MLVLGLTKFAVGIVLILLVRQLVQNLSLQVLYSWFKVVTRNKEARRRLEIEVPYKFVTYTSVGICATTFVPMLHRFLGLX

SEQ ID NO: 6102 - protein, 50 aa, Homo sapiens
MWQSCLCRFVLLIEGLEPGALPAFPGSPSSRHGLTVSHVEGLGSLMKCGL

SEQ ID NO: 6103 - protein, 13 aa, Homo sapiens
MWCPAFGRVFCSR

SEQ ID NO: 6104 - protein, 35 aa, Homo sapiens
MPLLQWLALLWPLLTTEAPSGGCSQPGPGPRSSLT

SEQ ID NO: 6105 - protein, 91 aa, Homo sapiens
FLIIIISATVMFLHVSERHCPCLRLEVLSAKVFFSCIVRSIHPLCALSAFERLGCSQAAVLRDLKRDLVSLGAESIYLGTLFQERPCLHFH

SEQ ID NO: 6106 - protein, 14 aa, Homo sapiens
MLHSRLYSLVGWLL

SEQ ID NO: 6107 - protein, 26 aa, Homo sapiens
MRTYLWILTCIRTSVQGPLMTMACPG

SEQ ID NO: 6108 - protein, 47 aa, Homo sapiens
MRNTAYLPISLLLVGSGLCLAQRITLFTSGTFRRKRLYRNYKATQMS

SEQ ID NO: 6109 - protein, 92 aa, Homo sapiens
  SITE (7): Xaa equals any of the naturally occurring L-amino acids
  SITE (30): Xaa equals any of the naturally occurring L-amino acids
MASQTSXIIWPLATLPHPISSFALYSSYTXRGVPKTSRWVRPQDLHMCCSLYLHRSFLFSCLLNSYLPSGLISTFSPLLVCCSYLRSNSREM

SEQ ID NO: 6110 - protein, 35 aa, Homo sapiens
MCLLWSWLWVQPTLRCVFIFHYKNYKQLFISRQEF

SEQ ID NO: 6111 - protein, 39 aa, Homo sapiens
MKKLMPREFRGFAFRCLTCRYLILLKISLDIVSVRCTDL

SEQ ID NO: 6112 - protein, 39 aa, Homo sapiens
MVKNALWNTLHSFLSRLRFTITIWKFLGCFQCLGGAQKC

SEQ ID NO: 6113 - protein, 38 aa, Homo sapiens
MGRFVLNVIFILYPVLSWEHKAKRPSILHYLLKTCPQA

SEQ ID NO: 6114 - protein, 32 aa, Homo sapiens
MLFLFWFCQFATREFIFEQLPMAMGLGLYSRA

SEQ ID NO: 6115 - protein, 73 aa, Homo sapiens [sequence omitted]

SEQ ID NO: 6116 - protein, 13 aa, Homo sapiens
MCSCSWASSCTVW

SEQ ID NO: 6117 - protein, 328 aa, Homo sapiens
MSSLKVAATMIILKFSMAPTAVPLSLLEFVMGPEAPSLLPPTSCPFASSVTTASQGRGFRAEYYSSPSNDSTNLLCLPNHMQASVSRSYLQSLGFSASDLVISTWNGYYECRPQITPNLVIFTIPYSGCGTFKQADNDTIDYSNFLTAAVSGGIIKRRTDLRIHVSCRMLQNTWVDTMYIANDTIHVANNTIQVEEVQYGNFDVNISFYTSSSFLYPVTSRPYYVDLNQDLYVQAEILHSDAVLTLFVDTCVASPYSNDFTSLTYDLIRSGCVRDDTYGPYSSPSLRIARFRFRAFHFLNRFPSVYLRCKMVVCRAYDPLPAATEAVC

SEQ ID NO: 6118 - protein, 31 aa, Homo sapiens
MQGQQTFPVKGQIGSIFGFLGCLLLLLLLWE

SEQ ID NO: 6119 - protein, 16 aa, Homo sapiens
MPFYCLSLLLLFFKLS

SEQ ID NO: 6120 - protein, 109 aa, Homo sapiens
MGSTQVSFFFLFSFLLPSFLHSSLPPNLPPSLPSLLPSFLNLGPPKSCWDYKAMSHRGPAYIPLFLIISFFIFSILLTFILTFLSAMKTAPNLPHLRLAIFDSLMGEVQ

SEQ ID NO: 6121 - protein, 31 aa, Homo sapiens
MYVFKTQLVTCDCEIDNTWMHSCSHRIGDML

SEQ ID NO: 6122 - protein, 25 aa, Homo sapiens
DSIPAAGELGIVFVAFFILDEVQKF

SEQ ID NO: 6123 - protein, 30 aa, Homo sapiens
MLTLFFKLLLISAYYEEHECTVHTNNLMSH

SEQ ID NO: 6124 - protein, 20 aa, Homo sapiens
MTKPKPLLLSYIFCFHVLSF

SEQ ID NO: 6125 - protein, 50 aa, Homo sapiens
MPTHPTRLVLLLPIDGEHLAGSLLISTVLLGPGTLQLPCKCSAQRLPNTS

SEQ ID NO: 6126 - protein, 32 aa, Homo sapiens
MSLLLINRMWPWVSTEPLLASASSFMWEFSST

SEQ ID NO: 6127 - protein, 6 aa, Homo sapiens
MLCHFF

SEQ ID NO: 6128 - protein, 232 aa, Homo sapiens
MPSLWDRFSSSSTSSSPSSLPRTPTPDRPPRSAWGSATREEGFDRSTSLESSDCESLDSSNSGFGPEEDTAYLDGVSLPDFELLSDPEDEHLCANLMQLLQESLAQARLGSRRPARLLMPSQLVSQVGKELLRLAYSEPCGLRGALLDVCVEQGKSCHSVGQLALDPSLVPTFQLTLVLRLDSRLWPKIQGLFSSANSPFLPGFSQSLTLSTGFRVIKKKLYSSEQLLIEEC

SEQ ID NO: 6129 - protein, 232 aa, Homo sapiens; identical to SEQ ID NO: 6128

SEQ ID NO: 6130 - protein, 36 aa, Homo sapiens
MLLLHLTLGLLPQAVQSLNFLFCFIHLTLQSLHPQA

SEQ ID NO: 6131 - protein, 28 aa, Homo sapiens
MLFCVLIGWISVCLILGILGEKKMVFSF

SEQ ID NO: 6132 - protein, 23 aa, Homo sapiens
KAAVMWGHWALLFFSTMCMHFGA

SEQ ID NO: 6133 - protein, 9 aa, Homo sapiens
MVLSPLFSA

SEQ ID NO: 6134 - protein, 224 aa, Homo sapiens
  SITE (137): Xaa equals any of the naturally occurring L-amino acids
MESGAYGAAKAGGSFDLRRFLTQPQVVARAVCLVFALIVFSCIYGEGYSNAHESKQMYCVFNRNEDACRYGSAIGVLAFLASAFFLVVDAYFPQISNATDRKYLVIGDLLFSALWTFLWFVGFCFLTNQWAVTNPKXVLVGADSVRAAITFSFFSIFSWGVLASLAYQRYKAGVDDFIQNYVDPTPDPNTAYASYPGASVDNYQQPPFTQNAETTEGYQPPPVY

SEQ ID NO: 6135 - protein, 13 aa, Homo sapiens
MEGTGSGNGRYCM

SEQ ID NO: 6136 - protein, 10 aa, Homo sapiens
MFVGCINVFF

SEQ ID NO: 6137 - protein, 486 aa, Homo sapiens
  SITE (200): Xaa equals any of the naturally occurring L-amino acids
RPPRVRATKMAAPILRSFSWGRWSGTLNLSVLLPLGLRKAHSGAQGLLAAQKARGLFKDFFPETGTKIELPELFDRGTASFPQTIYCGFDPTADSLHVGHLLALLGLFHLQRAGHNVIALVGGATARLGDPSGRTKEREALETERVRANARALRLGLEALAANHQQLFTDGRSWGSFTVLDNSAWYQKQHLVDFLAAVGXHFRMGTLLSRQSVQLRLKSPEGMSLAEFFYQVLQAYDFYYLFQRYGCRVQLGGSDQLGNIMSGYEFINKLTGEDVFGITVPLITSTTGAKLGKSAGNAVWLNRDKTSPFELYQFFVRQPDDSVERYLKLFTFLPLPEIDHIMQLHVKEPERRGPQKRLAAEVTKLVHGREGLDSAKRCTQALYHSSIDALEVMSDQELKELFKEAPFSEFFLDPGTSVLDTCRKANAIPDGPRGYRMITEGGVSINHQQVTNPESVLIVGQHILKNGLSLLKIGKRNFYIIKWLQL

SEQ ID NO: 6138 - protein, 388 aa, Homo sapiens
  SITE (102): Xaa equals any of the naturally occurring L-amino acids
  SITE (114): Xaa equals any of the naturally occurring L-amino acids
  SITE (121): Xaa equals any of the naturally occurring L-amino acids
GHLLALLGLFHLQRAGHNVIALVGGATARLGDPSGRTKEREALETERVRANARALRLGLEALAANHQQLFTDGRSWGSFTVLDNSAWYQKQHLVDFLAAVGXHFRMGTLLSRQXVQLRLKXPEGMSLAEFFYQVLQAYDFYYLFQRYGCRVQLGGSDQLGNIMSGYEFINKLTGEDVFGITVPLITSTTGAKLGKSAGNAVWLNRDKTSPFELYQFFVRQPDDSVERYLKLFTFLPLPEIDHIMQLHVKEPERRGPQKRLAAEVTKLVHGREGLDSAKRCTQALYHSSIDALEVMSDQELKELFKEAPFSEFFLDPGTSVLDTCRKANAIPDGPRGYRMITEGGVSINHQQVTNPESVLIVGQHILKNGLSLLKIGKRNFYIIKWLQL

SEQ ID NO: 6139 - protein, 510 aa, Homo sapiens
QAFTGYKRYQCVYSLAEIFKVLASFYVILVILYGLTSSYSLWWMLRSSLKQYSFEALREKSNYSDIPDVKNDFAFILHLADQYDPLYSKRFSIFLSEVSENKLKQINLNNEWTVEKLKSKLVKNAQDKIELHLFMLNGLPDNVFELTEMEVLSLELIPEVKLPSAVSQLVNLKELRVYHSSLVVDHPALAFLEENLKILRLKFTEMGKIPRWVFHLKNLKELYLSGCVLPEQLSTMQLEGFQDLKNLRTLYLKSSLSRIPQVVTDLLPSLQKLSLDNEGSKLVVLNNLKKMVNLKSLELISCDLERIPHSIFSLNNLHELDLRENNLKTVEEIISFQHLQNLSCLKLWHNNIAYIPAQIGALSNLEQLSLDHNNIENLPLQLFLCTKLHYLDLSYNHLTFIPEEIQYLSNLQYFAVTNNNIEMLPDGLFQCKKLQCLLLGKNSLMNLSPHVGELSNLTHLELIGNYLETLPPELEGCQSLKRNCLIVEENLLNTLPLPVTERLQTCLDKC

SEQ ID NO: 6140 - protein, 16 aa, Homo sapiens
MLLLAFVTSFFYLLYS

SEQ ID NO: 6141 - protein, 37 aa, Homo sapiens
MYLPVCYILLLIHPSRMQSWLTYMIRYNNRMSWKYRS

SEQ ID NO: 6142 - protein, 32 aa, Homo sapiens
MLSSSRSLSFIMSVLILIPGARSCGGPLVAQD

SEQ ID NO: 6143 - protein, 34 aa, Homo sapiens
MEEWGNGSGIGREGLLLIVLKAIGKSSLYVAVNL

SEQ ID NO: 6144 - protein, 22 aa, Homo sapiens
MEVMDILMALATDTVIPSLMVL

SEQ ID NO: 6145 - protein, 72 aa, Homo sapiens [sequence omitted]

SEQ ID NO: 6146 - protein, 487 aa, Homo sapiens
MFPLTWVFLALYFSRHQVRGQPDPPCGGRLNSKDAGYITSPGYPQDYPSHQNCEWIVYAPEPNQKIVLNFNPHFEIEKHDCKYDFIEIRDGDSESADLLGKHCGNIAPPTIISSGSMLYIKFTSDYARQGAGFSLRYEIFKTGSEDCSKNFTSPNGTIESPGFPEKYPHNLDCTFTILAKPKMEIILQFLIFDLEHDPLQVGEGDCKYDWLDIWDGIPHVGPLIGKYCGTKTPSELRSSTGILSLTFHTDMAVAKDGFSARYYLVHQEPLENFQCNVPLGMESGRIANEQISASSTYSDGRWTPQQSRLHGDDNGWTPNLDSNKEYLQVDLRFLTMLTAIATQGAISRETQNGYYVKSYKLEVSTNGEDWMVYRHGKNHKVFQANNDATEVVLNKLHAPLLTRFVRIRPQTWHSGIALRLELFGCRSQMLPAPTCWGCSQASLQTPRSPPLPPRNTSGAPVQPAWSAAARAGSLESLRPSPVRSGFR

SEQ ID NO: 6147 - protein, 33 aa, Homo sapiens
MPIHRFSVLALLVMPPLMNGRQVQVKEWCFWNP

SEQ ID NO: 6148 - protein, 41 aa, Homo sapiens
VGGWSWVWSPWLAAFVCARAARDPGPSVRWRPPFARSWRRP

SEQ ID NO: 6149 - protein, 26 aa, Homo sapiens
DVVCLFLFVYVLIKHVDYFYKTKGKM

SEQ ID NO: 6150 - protein, 26 aa, Homo sapiens
MGTCTWALSGPPSSADSASRLFSPPR

SEQ ID NO: 6151 - protein, 52 aa, Homo sapiens
MIIYVENPKELTTKLLKVFLVLISQLARLKDTRLIHKSQSLFYMASTNETRS

SEQ ID NO: 6152 - protein, 19 aa, Homo sapiens
MWSLKYSSYKIFVLLIFAG

SEQ ID NO: 6153 - protein, 69 aa, Homo sapiens
MDGGQAVPTLLGGAGLGGVFHCVPFSPRPVPRVWGALLRTPPRAPSSRLWTPRQERPSAAKRNKILASR

SEQ ID NO: 6154 - protein, 25 aa, Homo sapiens
MIVLICVIVFIIILFIVLFATGAFS

SEQ ID NO: 6155 - protein, 38 aa, Homo sapiens
MKAVIHQKYGFLHLLFLLFLSLHRISSATFTLNTKSSS

SEQ ID NO: 6156 - protein, 22 aa, Homo sapiens
FLFFGVLPVCKGEFVHWERPGS

SEQ ID NO: 6157 - protein, 92 aa, Homo sapiens [sequence omitted]

SEQ ID NO: 6158 - protein, 87 aa, Homo sapiens
  SITE (69): Xaa equals any of the naturally occurring L-amino acids
MNGRHRFCFLRCCGCVFSERALKEIKAEVCHTCGAAFQEDDVIVLNGTKEDVDVLKTRMEERRLRAKLXKENKETQGSRVCFKTRCQ

SEQ ID NO: 6159 - protein, 25 aa, Homo sapiens
MCWVLFFSPGLLFLSLLCPDFFSFF

SEQ ID NO: 6160 - protein, 31 aa, Homo sapiens
MRCFLFLLGGARFICQLSTVRKHFGSPLSDI

SEQ ID NO: 6161 - protein, 15 aa, Homo sapiens
MPFNKRSHSPAALCP

SEQ ID NO: 6162 - protein, 62 aa, Homo sapiens
RRAVRWELLVLLLLLLPTLRRPGPRCRPGPGCRLRPRRPRPRVRPSQDAAPGRVSTSWPHLP

SEQ ID NO: 6163 - protein, 22 aa, Homo sapiens
MIQWFHKGLFPFGSALLLVAAM

SEQ ID NO: 6164 - protein, 405 aa, Homo sapiens
MGFCLSSLLAWCVDCFFSLCSFGVKLMDFQAHRRGGTLNRKHISPAFQPPLPPTDGSTVVPAGPEPPPQSSRAESSSGGGTVPSSAGILEQGPSPGDGSPPKPKDPVSAAVPAPGRNNSQIASGQNQPQAAAGSHQLSMGQPHNAAGPSPHTLRRAVKKPAPAPPKPGNPPPGHPGGQSSSGTSQHPPSLSPKPPTRSPSPPTQHTGQPPGQPSAPSQLSAPRRYSSSLSPIQAPNHPPPQPPTQATPLMHTKPNSQGPPNPMALPSEHGLEQPSHTPPQTPTPPSTPPLGKQNPSLPAPQTLAGGNPETAQPHAGTLPRPRPVPKPRNRPSVPPPPQPPGVHSAGDSSLTNTAPTASKIVTDSNSRVSEPHRSIFPEMHSDSASKDVPGRILLDIDNDTESTAL

SEQ ID NO: 6165 - protein, 17 aa, Homo sapiens
MSSLLLIIILALSLAYE

SEQ ID NO: 6166 - protein, 51 aa, Homo sapiens
  SITE (43): Xaa equals any of the naturally occurring L-amino acids
MRAFIWTCGTWTLWSLSDRSLGSSRICMGFAGSLKRPGRTKAXTTFWGTWF

SEQ ID NO: 6167 - protein, 60 aa, Homo sapiens
MSPTGLLVVFAPVVLGLKAITLAALLLALATSRRSPGQEDVKTTGPAGAMNTLAWSKGQE

SEQ ID NO: 6168 - protein, 54 aa, Homo sapiens
  SITE (24): Xaa equals any of the naturally occurring L-amino acids
  SITE (25): Xaa equals any of the naturally occurring L-amino acids
MLCISVFCLLMTLLFPFVLVVLYXXLTFRSSWQYCFLHFIWDLSLFLIDHVCHC

SEQ ID NO: 6169 - protein, 30 aa, Homo sapiens
MRGLKPSWPQASLSPPPHALPCPCRVAMGF

SEQ ID NO: 6170 - protein, 44 aa, Homo sapiens
MNNTCLAVLHVVMCLAWSFLWSLLLHGFIHSFFSFISSCAVTCT

SEQ ID NO: 6171 - protein, 38 aa, Homo sapiens
MSSFSSALFCPLFFGSHFFLSIWVQMAFYMIENCKGKR

SEQ ID NO: 6172 - protein, 17 aa, Homo sapiens
MMAMLYTMLALDILVCG

SEQ ID NO: 6173 - protein, 34 aa, Homo sapiens
MLWFWGLWLQLWMWQLWVLLFGNYPHEVPRSCML

SEQ ID NO: 6174 - protein, 61 aa, Homo sapiens
MELVLAAAGALLFCGFIIYDTHSLMHKLSPEEYVLAAISLYLDIINLFLHLLRFLEAVNKK

SEQ ID NO: 6175 - protein, 61 aa, Homo sapiens
MPTTVPSSMFPCSLFLLWSQLWELLWSQLWGLLQLWGWWLLPEPPQAPSLPPAPAPEPRLL

SEQ ID NO: 6176 - protein, 40 aa, Homo sapiens
MTSMLLLVRWIPKLLLLLLSCMAPGYWGRSLLFLILKAGL

SEQ ID NO: 6177 - protein, 59 aa, Homo sapiens
PHLPLMIVNLILHFSCYCWCKKHLLYQDFKNQSDKSLISLIIITDKSIEFASDYFFFSS

SEQ ID NO: 6178 - protein, 11 aa, Homo sapiens
MGFEPGWPGKL

SEQ ID NO: 6179 - protein, 39 aa, Homo sapiens
MLLEKVIRLRCSCFVLLCFSLSWVGVSSSNDVQVDLFSH

SEQ ID NO: 6180 - protein, 71 aa, Homo sapiens [sequence omitted]

SEQ ID NO: 6181 - protein, 10 aa, Homo sapiens
MPGASRSVCL

SEQ ID NO: 6182 - protein, 39 aa, Homo sapiens
GVSKRFPVAATRTAWYCLHVLSYFCFALLQLLAVGPWRN

SEQ ID NO: 6183 - protein, 31 aa, Homo sapiens
MWPLRLLCTSWSFLRSPFLGLARLKKKTSSF

SEQ ID NO: 6184 - protein, 20 aa, Homo sapiens
MLHCYPALPSLIFLGVAWGF

SEQ ID NO: 6185 - protein, 74 aa, Homo sapiens
  SITE (33): Xaa equals any of the naturally occurring L-amino acids
  SITE (74): Xaa equals any of the naturally occurring L-amino acids
MFTYWFTMLFMCKLSKCKLNINVHALPKKKKKXSRGGPVPNSPYSESYYNSLAVVLQRRDWGNPGVTQLNRLAX

SEQ ID NO: 6186 - protein, 13 aa, Homo sapiens
GNKRIKRLMPYYF

SEQ ID NO: 6187 - protein, 10 aa, Homo sapiens
FGYFQIYVFS

SEQ ID NO: 6188 - protein, 44 aa, Homo sapiens
MFSCMSNLIYLLPVTYLIMWLLIGSHSPFLSRYSTTFQNSHWQV

SEQ ID NO: 6189 - protein, 33 aa, Homo sapiens
MRSWIDFVSIYSSALCIPWFLHPWIQPTKARKY

SEQ ID NO: 6190 - protein, 38 aa, Homo sapiens
MPCWVTGWTCCSLQSHSQPAHMPPSKRILLFTSLLLQP

SEQ ID NO: 6191 - protein, 271 aa, Homo sapiens
  SITE (211): Xaa equals any of the naturally occurring L-amino acids
  SITE (221): Xaa equals any of the naturally occurring L-amino acids
  SITE (233): Xaa equals any of the naturally occurring L-amino acids
  SITE (237): Xaa equals any of the naturally occurring L-amino acids
  SITE (270): Xaa equals any of the naturally occurring L-amino acids
GFYLTAFICFLVFILNAGLVWFFPWREAKPGSTEKGLPLRKTHVLLGRSHDTVQEAATSRRARASKKTAQPWVEVVLALRNMKNLLFSEMWDIFLVRLLMAMAVMLYYSNFVLALEERFGVRPKVTGYLISYSSMLGAVAGLALGPILRLYKHNSQALLLHSSILTCTLLLLYSLAPTMGAVVLSSTLLSFSTAIGRTCITDLQLTVGGPXPAAPLLRGAXCDCSGPISPSLXGVAXRQPWAPSWPGSYAFIMSLNKRHSSGDGNSKLKXE

SEQ ID NO: 6192 - protein, 38 aa, Homo sapiens
MLGIATVFFFGLGLEVVGKNACQPALHLGLGACQLPAL

SEQ ID NO: 6193 - protein, 18 aa, Homo sapiens
MGDLKLVLLISELIIEFP

SEQ ID NO: 6194 - protein, 31 aa, Homo sapiens
MPRSFLSTFLFFGTVRGFTLSSWTSLPQSWN

SEQ ID NO: 6195 - protein, 37 aa, Homo sapiens
LPFLSLCCAMSSSSPLVLGAWQEVAAIGCFLNEGANQ

SEQ ID NO: 6196 - protein, 68 aa, Homo sapiens [sequence omitted]

SEQ ID NO: 6197 - protein, 50 aa, Homo sapiens
MVGETCLLFHLGVTCSLAWRRREKTEKGVIPNICIAQSHTRDLISLAILC

SEQ ID NO: 6198 - protein, 22 aa, Homo sapiens
MVMVVVMMAVVLYFCAPSGPSH

SEQ ID NO: 6199 - protein, 124 aa, Homo sapiens [sequence omitted]

SEQ ID NO: 6200 - protein, 348 aa, Homo sapiens
  SITE (34): Xaa equals any of the naturally occurring L-amino acids
  SITE (37): Xaa equals any of the naturally occurring L-amino acids
MNMTQARVLVAAVVGLVAVLLYASIHKIEEGHLXVYXRGGALLTSPSGPGYHIMLPFITTFRSVQTTLQTDEVKNVPCGTSGGVMIYIDRIEVVNMLAPYAVFDIVRNYTADYDKTLIFNKIHHELNQFCSAHTLQEVYIELFDQIDENLKQALQKDLNLMAPGLTIQAVRVTKPKIPEAIRRNFELMEAEKTKLLIAAQKQKVVEKEAETERKKAVIEAEKIAQVAKIRFQQKVMEKETEKRISEIEDAAFLAREKAKADAEYYAAHKYATSNKHKLTPEYLELKKYQAIASNSKIYFGSNIPNMFVDSSCALKYSDIRTGRESSLPSKEALEPSGENVIQNKESTG

SEQ ID NO: 6201 - protein, 132 aa, Homo sapiens
MLVIQITSVDFHGIPLSVPQSLTRRQCTCRGWKEDEPMSRLCINQGERKSRWKEVGRWRKQQLLLALDDGPEGLSLLVTPLWVLFPYLSVTRFLILIPCCEFGSLCWAIQSSSERAKLVLELRCRWGKRGLS

SEQ ID NO: 6202 - protein, 9 aa, Homo sapiens
MPLWAHLAS

SEQ ID NO: 6203 - protein, 59 aa, Homo sapiens; identical to SEQ ID NO: 3830

SEQ ID NO: 6204 - protein, 120 aa, Homo sapiens; identical to SEQ ID NO: 3915

SEQ ID NO: 6205 - protein, 101 aa, Homo sapiens
VQTLPLHPPGLPSSASSVSKMEPPHLRSTRLTRTHAPPSALIKPTDPDSLSATPGWSGPRCGSALSTPRAPRPSEGAPAGASDTLQFRAVGGLGHIPVPWL

SEQ ID NO: 6206 - protein, 32 aa, Homo sapiens
MLAAVGRPKPRSPLSSLSTLQLYLFCSSTRRS

SEQ ID NO: 6207 - protein, 282 aa, Homo sapiens
MASLGQILFWSIISIIIILAGAIALIIGFGISGRHSITVTTVASAGNIGEDGILSCTFEPDIKLSDIVIQWLKEGVLGLVHEFKEGKDELSEQDEMFRGRTAVFADQVIVGNASLRLKNVQLTDAGTYKCYIITSKGKGNANLEYKTGAFSMPEVNVDYNASSETLRCEAPRWFPQPTVVWASQVDQGANFSEVSNTSFELNSENVTMKVVSVLYNVTINNTYSCMIENDIAKATGDIKVTESEIKRRSHLQLLNSKASLCVSSFFAISWALLPLSPYLMLK

SEQ ID NO: 6208 - protein, 571 aa, Homo sapiens
  SITE (189): Xaa equals any of the naturally occurring L-amino acids
  SITE (531): Xaa equals any of the naturally occurring L-amino acids
  SITE (535): Xaa equals any of the naturally occurring L-amino acids
  SITE (538): Xaa equals any of the naturally occurring L-amino acids
  SITE (545): Xaa equals any of the naturally occurring L-amino acids
  SITE (554): Xaa equals any of the naturally occurring L-amino acids
  SITE (560): Xaa equals any of the naturally occurring L-amino acids
  SITE (561): Xaa equals any of the naturally occurring L-amino acids
  SITE (564): Xaa equals any of the naturally occurring L-amino acids
  SITE (566): Xaa equals any of the naturally occurring L-amino acids
  SITE (567): Xaa equals any of the naturally occurring L-amino acids
  SITE (569): Xaa equals any of the naturally occurring L-amino acids
  SITE (571): Xaa equals any of the naturally occurring L-amino acids
MSALFLLVIGTAYLEAQGIWEPFRRRLSFEASNPPFDVGRPFDLRRIVGISSEGNLNTLSCDPGHSRGFCGAGGSSSRPSAGSHKQCGPSVHPHSSHSNRNSADVENVRAKNSSSTSSRTSAQAASSQSANKTSPLVLDSNTVTQGHTAGRKSKGAKQSQHGSQHHAHSPLEQHPQPPLPPPVPQPQEXQPERLSPAPLAHPSHPERASSARHSSEDSDITSLIEAMDKDFDHHDSPALEVFTEQPPSPLPKSKGKGKPLQRKVKPPKKQEEKEKKGKGKPQEDELKDSLADDDSSSTTTETSNPDTEPLLKEDTEKQKGKQAMPEKHESEMSQVKQKSKKLLNIKKEIPTDVKPSSLELPYTPPLESKQRRNLPSKIPLPTAMTSGSKSRNAQKTKGTSKLVDNRPPALAKFLPNSQELGNTSSSEGEKDSPPPEWDSVPVHKPGSSTDSLYKLSLQTLNADIFLKQRQTSPTPASPSPPAAPCPFVARGSYSSIVNSSSSSDPKIKQPNGSKHKLTKAASLPGKNGNPXFAAXTAXLRQEPRXGMALLKVSXKQNRFXXAAXGXXTXSX

SEQ ID NO: 6209 - protein, 317 aa, Homo sapiens
MIRIAALNASSTIEDDHEGSFKSHKTQTKEAQEAEAFALYHKALDLQKHDRFEESAKAYHELLEASLLREAVSSGDEKEGLKHPGLILKYSTYKNLAQLAAQREDLETAMEFYLEAVMLDSTDVNLWYKIGHVALRLIRIPLARHAFEEGLRCNPDHWPCLDNLITVLYTLSDYTTCLYFICKALEKDCRYSKGLVLKEKIFEEQPCLRKDSLRMFLKCDMSIHDVSVSAAETQAIVDEALGLRKKRQALIVREKEPDLKLVQPHSFLSSPGSASERACWPCTIISPPVSPHVPALAKGLICRTTRTPASLLSPPWW

SEQ ID NO: 6210 - protein, 18 aa, Homo sapiens
MGQSVNHLRVSEYSQFSL

SEQ ID NO: 6211 - protein, 379 aa, Homo sapiens; identical to SEQ ID NO: 5134

SEQ ID NO: 6212 - protein, 9 aa, Homo sapiens
MVLSPLFSA
